United States Patent Application Publication US 2024/0065297 A1 - sequence listing, part 6

SEQ ID NO: 14 - DNA, 1506055 bp, Pichia kluyveri
  >NCYC246_000003F P_kluyveri_NCYC246_TS
tgtaattcttactaccacgaataaaaatccctaaaaagtcaacaaattcaaatttgtatctctcatcaattccctcatttaactttttttaaccataggtggaatgaaaagtaaaatatcatcagttgcaggtgataatgatttatttggttcaacttcattaatcttatcttttacagctaaattggaatttggatcgacttcttttggggtattaaaatgttcattaggtgaagccttttcatcaataatagcatcagcagatttgattaatgaagttttatcacttgattctattttaacattcttagaagttgatttattaatgtctttttggttaaaaatatttggaggagaattggaactagtggaacgagtaattaatgagtttattggcagtttagtaattttatcatttgaaacagcagggttatcatcagatttaatttggtttaccattttttcatcaacaacatcagcacctttagcacctttagcacctttagcacctttagcacctttagcacctttaacacctttaacacctttaacatctttaacatctttgacacctttagcatctttagcatctccagaaccaccactatcaccgatatccttaacacctccagctccattactatcatcaacatcactaacacactcagcaccaatagaatcatcaacacctttagcatcattagcaccatcagcacctttagcaccatcagcatcagtaacaccatcagcatctttaccaccaccattaccaccttcatcttcatcataatctttatcatcaaatttcaatttaaattttgttttaagtgaaagttgtgttaatctatcatcatcaatgatttcttgataaggattatttattacacttttataactaattgtatcatcaacaatacttaaattaccatgtaaaagtgaattaatagtatcattaacaccagtataaccaagtccatcaatacattgattttgaaaaacttcaaattttctgagatgaaattgagtaaatggagggaattcatcagccacaatagtattctcagttgaagtgaaatcataatctaataattcaggatcaaacatggcagaaaaattaaaccataatcattaaccttagcaccaaatgaacaatcatatctaaaattataagtttgatcatcatcaggttcttcaattaaaatagttggattaaaacgatatttaaaaccatctttacattcttcatataattttaacatttctgtttcataatcttcttcatcactaaaagcactttcaagaaatatttttgaaattttatttcttaattccacagggcaaggaactgcccaaccagttctaacagaaacaccatgtttatcatcaaatctaaagaattgcatattacatttagaaccaatatcttaagtgcaattttataaaatgaattttcaatattgttaactttcattctatattcatgaagccaatcagtatgaaaaaatctatgagttgtttgaaatgattttcttctaaatgcaacaatttctttgatacattcaagtcttaatgcaggactttgatttttttctggaaacataaaatcataagcatgcataagatcatcaggtaccttatttaatgatttaggtgaaacatcaaaattgatatttttaatttttttaaggtttggtttaattggtgagttgacaggatttaattgattgattgttttgacagggttaacaggattgacagtagttgaattttcatcaacagtagattgaacaggttgaatcttttcaacaagatgaccttggtcaaactttaaagttttaagtgataaatcactatataatttgaattcatcacttggaatttttgaagtttttaattttgctaaatttgcaagtttgaatttcagaatagtattgatatttggattatctgaaatctttttagtcttttgaaataatctattttcgatatgccaattaagaagtggtgaataatttttcttacttgacagaccacataaaagatgacaaacaaaatcttcatatttagcatcaggttgaacttcatgtaaataatagtcatcagagtataagaattctgcagattcatattcatttattgattgcaaatgtgttttcataaagttaagaatataatcagtatcataattataatatcttttcattgaagtaatatcataattaaaagttttttttaatttatccttaaataattatttaatggtttaacataatctaccaaaggactatcatcaatatcagcagtttcaaatctactatagaacaatttagactttctatgagatttaaagaatgtaacaaagaatcataatttctggcagagaatctccataaaatttaggattatcaatatatttattaatttcttcaattgtaacatcaaagattatccatagaaattttacaaagcatcttttctaatttgtttaattcttaatgggtttttcaatacagtaatctaagttaaggaccatgatatatcatcatcaattgtcttcttaatagtttagcacgaagataacatcacgctttttgaagttagcataattagattttctagcttcaataaattgactagtaccataaagagttaatgcgttgtagctacatgaaccaatatggcattttgaactttaaaacactctgatgagaaatgcattattaaaatagtaaactaaataataatgtattaatcagtaaataatgctttaatgaattggcttataaacttagtgaataactttctatatgtaaattaatgattcaaattaaattgggttcggaaactttttaattcaaaaaataagagatccagtaaacaataaaccggggtatatgcgacagtacttagtggcagtaatgaaataaatcaaatgaagtttaaatgaaatgaaaaataaatgaaataggaccaaaaaacggtaaagaaatgaaagaaaggggatggaaataagtgaaagtaaaacaatcagaaaaggggaggggaaatcttctaaatgtacaaaaatataccaagattgaggtgaaagatcactataaagatgattcctctcttccccattctactaaaatgggtcattccatggtccaatcttcattctatatcagatgctgatgcctattaattatttttccctaattaggtaaatttttattagtttccctcattttatttgattacgtaacaaacaatctattcttaatttttacatagtaattaatcaagtgattttgcacaaatttttatgtaatttatcagttgttaactattcggatactcgtattggatggatataaagttgctatgctgtttttgagtttggcaagtagttagtagaagaaatcctgggaaaaaaattacaaacaattgattgtaaaaagggagaaaaaatcatttcaaccccctgaatggcaaaattgaattattattccatgattaaaggtataaatcgttttgaatgaaaagaaataagatatattcagagctttcaaagattctccggacgttgctccatattacaatgccattaagaattgcacgtaatacaaacaattaacattagaaagccacccagagagaagaaagaaagaaaagtccactcagaaagaaacagccccaagttaaaaaaaattgaaatttctacccagctctgccatcaaaaatttacttttcacccggggacaatccccactgatgtaggttaatagggacatcagtatcttctacactgacaagaattacaccaattatgagtgaacaaccatcaatttgacgctgtgtgtataccactagaatcaaattcctgaaatatttactgaatttgcaagtaaataggattatctaccattattaaactttcactgatatttactcattagatgatcctgatcttatctcatttataccaaggccaatacacgcaattatattacttttcccaataactgagaaatatgaacaattcaaagactctgaacctgttgaaaatatagataattcacaaattagttggttgaaaacaagttgttaaaaatgcttgtggtttatatgctttattacattcactattgaatatatctagaggtttaatagttcaaagttcaccagttgataaatttcgtagtgaaattttacagaataattcagatcctgtaaaattagttcaaaatattgctaaagatatgtacacttcttttggggaacagggtcagactgaagctccagctgctgaagataatatagatttacattttgtttgcttcgttaagaagggtgatactatatacgaattagatggtagaagaaatggtccagtgaaattaaacgaaaactgtgatgtcaatggtgatttattagccgatgagactattagcaagagagttaaacaatacatatctcttgatgatgatgataatgccttgaaatttgcactaatgggattaacaccatcaatggattgatttaagttaaatttacttaacatattatacaattattataattttctatatacaatgtgaaacaatatttcatgttcttaataatcaaactttttgctttttatttccgttaccagaattatttttctttttcttagatttggtttctttctttgaagatttatcctctacatcttcctttatctcttcctcctcttcttcagtaccaaagagtttttccaaattagctccttgagattcgaaaacttttctttgaatatgaaattcatcatattggatcttcatattatcaaatgcaaaaagtatttcaatagatccagcggcagctctagtttcaatatctaattctttggaaaatataggtgatttaatctcaattgcaagttcaggattattagtaatttctgcataatactccttgaaagttgttgtagaaagtagtggaatatcagaattgtcatcaccatcaatgagatcatccttggttattggattctcaagtctcttataaacaacatcagaacatgtaaatgatttatatctttgtgagaaatgtgtcaataaaattttcttagccttcattaagataccaacatgaacagcttcagatgtagttgaatgccttttgtcaaatgcatctttgaatttttcatcttcaagtgtggattcatgaatgagtaaatctgaattttcaccaatatgtgtaaatacaaactttggtcttgtatcacccgaatatgaaattttgaaaatattatcagatgaattatcatttgaatcaatgtttaatttaaatgacatactaacagagtatgagaaatcacaatgttgtgcagcacatgttttaatttcatccatacctaaagttgaataaacaaattcagatttattaatatctttaacaaattccacctcttcagatgggattgaatccaaattatcaatttcttcaatttcaaattgttttgatgttgggaaagttttaccaagcataaattcctcacatgagatataaacaataaaatcagtattaataaatgggtcaactctatttaattcttgaagaaaatattcatattgccatggtgcaataacaatcaatttctcaaatctttcattaacaccaaatttaaattcttgtcttgaattccattctcttataaaatcaacaatacctaaatgatgatctgcatgtaaatgtgataaataaaccattttcaattcatccaataacatttcaacttcttcttgtttatatattctacgtaatgtaccaaatgaattttctccaccatctaaaagaattgatctgtaaccgctcgtgccatcatctttaacatatggtattctaacaatatttgaaagaacgtttctaacagtggatggtaatgcagaacctgtacccaatactaaagtatcgacttgatccttcattgatttatttaaatcgactgaagtttttaaaacttgtacattattattattactttcatcaatcattgtattaaattgttctctactagcaacatctttaagttctagaggtttgatttccatatcatatatatcattacaatctttcttctcaaataatgggatgttttcaccacttgctatattattattttgagtaagatttgaaggagttaataagaattgttgtccagatatcaatggaataacattagttaaatcttcattatttattttaagagctgattcatttgtccatttaggtaatgggaagaaattctgtattaatgatttccattttaatgatactctaaatgttttatggaaatttaaactgttaggacaataggatttatgacttattaaatgcattgtagaaggaccaaaagatttaataaattgaatatatctttcatttgataatggatcttgaattgattcaccaaagaaatggaataccataccataagataaattgtctggacaatcctttttccaatcgtgattaatgaaattttccatgtattcctcagatgggatatccaatactaatataggtgcaaaatatcttgttggttctagaacttgttcaggtttaacaattgtaccattctccaagacgacttcttcattattacataatttcttgaaatgagtgaaatcacaacctaaacttttagcattattaacaagaaatttacctcttgttggttttggatatattatccaattagtggaaacttttggatttataattgatttaggtaatgtaacattagtaattttcttggaatttgtaggatttgaaggatttgcctgtatagggaatatatttgaaaccatttgatttaattttgcatggtcaactagattatgatcattttcattagatccataattcatatttgaatgtatattgattgggatatatttaacactatctctttcaagagattgatttacatcttctatatttaagttcattccaaatctgaaaacaaaatatctccaacatgaaaccatatattgaataagcttattaccactatgataaatacctaattttttaacaccttgatcactaacagttaaaatgaacccaggtaatccagatatagccttccaagaaagcacacctgtaagaaagatgtttttcaatcgacttatcctatattttttctcattacattgtctctgtaaacctgctgggacattaccgataattgttctatcacctgtacttttatcttcgagaaagagagctggtttagaaatatctgaagttggatgtgagattactgatagggaaaatgacatggctatatgttttgccttgattgaattagaaatggaaaattgacgctgtggatggatatgataaactgttttgaatgtataacttttgtcagtattggagatgatacccctgatactatatctagataaatgagacggaaacaaaacggaatgagaagatttttcaaaggttttaaaatcaaaagatgagaaagggtattatctctactagttctagtatcttactatgtgcaatatcagtatataagtgcaaataaagcaacataaatgaccagaatgaaccattcactacatgaaattctctaaagtgataaatttcatgtcaaagaaaatcgccgcttttttcattttctgaaatttttttttcagtgatgaaattttaattttacttttactacatgaaaaaaaatttttattttttctattttacttagttagacttttcatttgttagatttattatttaacatagcacaggcttcctctttatctacgacaatggcaccaaagagaacaagagaagaccctgataacaaggaacaaaaatccttgctttcatccgctgctgaaatcgccttcccaagaggtggtggatctattttaactccaatggaaatgaaggaagttgcaaatgaagctaagagggatgttcttttcgaacaagctgctaaatctgacgaaccttctaagaagaaatctaaaactaataataagaaatctaaaaaattgaatcttttatctaaggatgaacaagagaatgatgaaaagaaaaatatcgataaaattactattgatacattatcatataatatcttaaaccctggttcatacgttttaggtatggttcaacaaatcaataaaatggaaattgttctctctcttgcagataatttagttggttatatcccaattactaatatttcatctgaattagttgatatattagaaaaatatgatgatcaagaagaatcagacagtgacagtgatgaagaaatggatagcgatgatgaagataatgataagaaaacttcaactgataaaaaacaacaaattgatttcccatccttaaatgaaagatttttcattggtcaatatctaagagctaaggttgttccaaattcaaaggaaaaattaaagaaaagaattgaattatctattgaacctgaattagtcaacagtgaaatgaccgaaagtgaagatcttattgaaaatgccattattcaagcatccgtatcatcaattgaagatcatggtgctatcttaaaatttggtaaaaaattcagtcatactggtttcatatccaagaaggaattatcatccctttcatccaaaatagaaataggttcagttattcttgtcactgttgcaaagataaattcaagaactgtcacttgtaaaattccaattgcaaatatcaaaaaacaaccaatggttgcatcagtctcagctgttactgctttattacctggtatgtttgttgacgcagttattgaaaaagttactgaaaatggtttattatgtaaagttctttcaatgtgtgatgcttccttaactttacaacatatgaattgtttacaaagtcctgatgaaataaaacataattattcagttggttcaatcttaaaggctagaattattgcctcatataataaaaatgctgaatataaattatctatttccattttaccatctcatcaaagtttaacctacgcaggtaaagatgcattagaagcttttccaattggtcatacactcgataatgttacagttaaaggtaaatcaaataatttcttctttgttgatttaatgtcaggtgaaattccaggtcaagttcatagaacaagagttactaaaggtgcagatttagacttagattttaaaattggttccactcataaatcaagaatattagattattcaatgtttgataacacctatattttaacattagataaagaacaaattgatgttaattttataagagcaaatgatattccagttggacagaaagttacctgtgttgttgaaaaagttagttctgaaggtatcgttcttcaacttgaaaataatttccatgcaactgtaccagaattccaaattagtgatattaaattagtttatcctgaaagaaaattcaaaatcggttctaaagttaaagctagaattttaaatgtttcaaattatggttcaaaatcaacaatcactgcaactttgaaaagatcattagttagtgcagaagatgatgaaattgttaaaacttatagtgatttatctgaaaataaacgtgctcttgcaactgttcaaaaaatcttaccatccggatgtgttgtttcattctttggtaatgtatctgctttcttaccaaatgcagaaataagtgaaacctttgttaaaaatgcaggtgattatttaaaattaggtcaaacagttaaggttagaattgtttcatttgatgctgaacaatctaaatgtttagtcagtttaagaatttcaggtgatatgtcagaagatcaattgaatagtttaaaagatttaattccaggtaaatctattgttgaagcagaaatccttgaaaagcaaagagaagaaattcttgttaaaattggtggtcaaaatatcaatggtgttattaaagttggtcatttagctgatggtcctgctgatcttggtagaaatcaattaaaaaaattaaaagttggtgaaaaaattgaagcacttattttacaaattgataatcgtaaaagaggtgttgttttaactgctaaaccttcattaattaaagatgcaaaaaatggtctcttaccaacttcatatgaagatatttcaatctctgataaaatcttacatggttatgttaaaactgtcattccatcaggtgtcttcgtttcattcagtaataatttaactggtttagtcattccaagatttgcttctcaaaagaaaattaccgatttaactaccgttttcactccagatcaatcagtcagttgttcagttgttaatgctgatgaaaataataaaagattcttactttcattattagtcgaaactgctaattcaaaggaagctgcagttaatccagttgataaatcaattaaaactttaggtgactattctgttggtaaaattactaaaggtactattaaatcaattgaagatacccatttattagttaaattatctgataatcaagaaggtcgtattgatataactgaaatttatgatgatattaaagatatcaaagatttgaaacatcctctttctaagtttaatcttggtaaaaaacttgatcaagttaaagtaattggttatttcgatgttgaaaagcaaaaatttattcattctaaaaaatcctcaactaatttagttgaattatcaattaaaccatctaatttgaaatccactgattcagcatatccattatcatttaatgatattaaggaaggtcaagaagttttaggttacatttcaagtataaattctggttatttctggtataatatatctgcagctcaaaaggctaaaatgtcatttgttgatgttactgatgatatttctaaattatctaattttgaaaatgaatttaaagttggtactattgttcctgctaaggttataaatgttgatattgatcattacgcaatcaatgtttctggtcgttcaaagatgattaaatcttcagatgatattaaagttggtgatattttaccatcattagttttgaatgttagagataattctgttttagtttcattaggtgaaaatattactgctgtttcaatggttaccgatgctttagatgattatactttaaaattaagtgatgttttccatgttggtgaattccatactgcacttgttgtttcaactgatagaaaactgtacgtttcattacgtggtccaaatccaaaggatagattaattaattctgttgaagatgttaaacgtggtgatattgttagaggttacattaataaaattaccaattctggattatttgttgatttaggtagatctgtctatgcattagttcgtgtctctgatttatctgatagtttcattaaggattggaaaaaattattcaatgtcaatcaatcagttaaaggtcgtatacttgaatcacaatctgaaggtagagttttaatgtcattaaaggagtctgttgttagtggtgatttaaagaacttaaaatcatttgctgatttaaaagttggtgaaatttatgaaggtacaattaagaaagttgaagaatatggtgcctttgttagattagatggtactgataatgtttcaggtttatgtcatcgttctgaaattactgattcaccaattaaaaatgctgaagatattttcagtgaaggtgaaagagttaaggttaagattttagaaatcaatgctggtaaaaaacaattatcattaggtatgaaagcatcatatttcaaagatggtgaagatgaagaagaagacgaagatgtcgttatggaagatggtgaaaataatgatgttgaaatgaatgaagattctgatgatgaaaaaatggaagatggtccagaaaatgacagtgaagacgaagaagcagaagaaagtgatgaagaagaagaaactaataataatgaatcaagcgaaggtctttcaactaatggtttatctacaggttttgattggactgcatctattttagcacaagctaaggaagatgaatcatccgatgaagaggaagaattcaataacgaagttaataagaaatctaagaaatctaaggctaaagctgctgaagttgaagataaaactgatgaattaaatactagatcaccacaatccatttctgattttgaaagattattagttggtaatccaaattcttcaattttatggattcaatatatgtcattccaacttcaattaagtgaaattgaaaaagctagagaaattgctgaaagagcattaaagactattaattttagagaagaacaacaaaagatgaatatttggattgcattattaaatttggagaattcatttggtgatgatgaaacattagatgcagttttcaagagatcttgtcaatatatggatgcatatacaatgcatcaaaaacttgttgcaatttatattgcatccgaaaaattcagtgaagctaattcattattcaatgttttatgtaagaaatttggttcaaagaatccatcagcttgggtttcatatggtaactttttaattgatggtaaaaagaatgaagaagcacataaaatacttgcaaaggcattacaagttttaccaaagagagatcatgtcgatgttgttagaaaatttgcacaattagaattccaaaagggagatccagaacaaggtcgttcattatttgaaggtttattatcagatgttccaaagagaattgatttatggaatgtttatattgatcaagaaattaaagctaatgaaaagagtaaagtcgatgaattatttgaaagagttattgaaaagaaattaactagaaagcaagctaaattcttttttgctaaatggttaggttttgaagaaactcaaggtgatgaaaaatctcaagattacgttaaggctaaggcagctgaatatgcacaaaagctttcaaaataaaagtaccaataatctctgttaatattatacattctgttacaccccatttttatttatatttatatataactgtatttttgtatttcctgtttgtttaaaaagaactttacgttttagaaatcattataataaaaggtgtaaaaaaactcattgtagagataagggaaagtggaatatttttttgttatctataaatttactccttttttcccttactttttatttacgacttctattttcatttccttttatattgacattgttgtattgtttactggtatttgttgattaagcagtatacattgagtagaactaccttatattgtagattgtagcaatataataaacccatgctgccgaatacttcaactttttttacttgttttgtccccataatagcaatcttcttattgattgtctatttacaattctttcaattctcattaaatggtgaatacacaattccagctattttccaagcttcttatggtaatatttgtaaatgttccggatgggataaatattcaaatgaatttgtccccgtttcagttaatcaagatggtacaagtttaggatgcttaacatcacataaggaaagattgttatcagtttccaaagcaaatttcagttcattagcaagggaaagttttggaaagtaagtataaaaaatttattttctattattattaactgaatactaacaatttttaaattatagatgtcttgatatgattccattaataactaaggatcaaaatatacttattgcaattaaagaatgtattgtaaactcaaatggtttagatgagtcaatttcagaaattattcaaattaaaaagcaaacacaaagatacttatatttctgtattttcattattgcttcatttgtttttcataaatacacaaaaatcatgaggaagaccattattgaagaagaaatgatatcaaaggtaagatcaaatttaaagagagattccaatggcaacttgaatatcaaacctaaaccaagaagtaatttttttccagaaacaaacagttattgttcaaattcaccaatatctaagtctcaaaataataaaagaggatttaataataataataataatatttttgatcagcaattattttttaaagatgtattccaatcaacagctaaaaatgaagcaccactgacttcaactccaaaaatggaaccaactaagataaatgatacacaatcaatacctttaataccatcttttcttatgaacacaccaaaactcacaaaggaaaaaccaagtcaaaataaagttgttaaaattagtcatgagaataccaagaaagcttcaaaagttgatacaaagaatgttttagcaggtctcagtgagataagtttagaagtaacagaaaacaagaaaaatattagttctaacaaaaaggaaaccaaacaagatattcaaacaacttttaaattagctattcaaaataaactcaataagaaagatgaagaagagaatagagtaagttcatcagagagatttggttcaacaatcacagaaagtgaaagtcacaataatactataagtacatcagaaaaatcatctacatcttcaatgaaaacaaatgctaccaatactaccaatacaggtaatagtaacagtttgaatgttaataaagaaactgttcaattttatatgacatatcccgccccatcattaacttcaaattggaataatacaaataatacaaataatacaaataacaacaacaacaaaaaaataaatggaaaaatcccaattgcgccatacaaaataagaaatactaacaatgatatgaatattggtgtgtatgctagaccaaatcatatgatcccaggtggtattccacttggtcctagagcaatgactatcccccctgctaatttatgcatacagaaccatcctatctatggtccatctatctggaatgatccaattgtccgtgctataagaaggtaatcaaatgtataagaaactttgctaaatagaataaaaatagaacaaaattttatgtaaatactttataattgctaaacgtagaaataatgaattaccataaatggaagtagctaatgcaaaagaaaatcatgtttcctttttaacggcccctcagaaaaaaaattcgaatgaaaaaaaaatatttttttttccctaagaaatttttcatgaataattttgttttaaaataattttttttttaaaatttactttaaaacgttagtttaataaattgtttgaataccaaggatgatttctgcaacagcatgggttccaaggggtattgccagtgaatttccagaaacttatgaattaaatgatgaagaaatggctagaattgaagctatgtcaagtttaaatttacaagacgctaaggcagatcttgaaaatgctgaacaagttgaaggtgatgaagatattgaaattgagattgaggaagaaacagaagaaactattaattctaataaattaaaggatcaaattgatattgatgatgatttaaaggaatatgattttgaacattatgatgatgaagataatgaagatggtgaaaaaattgttatgttcccaggattaagtaatagtgcagcaaaatatattaaagttgcaaagaaacaaagtggtaatgggggtgaagaagatgaagatgaagatgttgaatttgttgaaggtgaagaagatcattatttacaattaccaactgaagaggaagaaaatgaagttaaggcagaattacaaatttatccaactgataatttaattcttgcaactagaactgaggatgatgtttcatatttagatgtttatgtttatgatgatggtgcaggtgcattaggacctgaagatgaagaagcagctgaagaagagaaaaaaattgatgaagatgttaaacgtggtatggttcgtgaaggtaatttatatattcatcatgatttaatgttaccatcattcccattatgtgttgaatggatgagttttaaaccaaatggtgaaaatgatgtgagtaatattggtaattttgcagctattggtacatttgaaccaactattgaaatttggaatttagattgtattgataaagcattccctgatgttatattaggtgaaaatgaatatgcagaatggagtgccaaaaatgttggtggtaagggtaaaaagggtaataagaagaagaaaactaataagattagttcaacatgtcataccgatgcagttgtttcattatctcataatcatatttttagaaatgttttatgttccacttcagcagatagtacagttaaattatgggatttgagtaattgtaaagttaataaaagtattgaaggattacataatggtaagacagtttcaagtagtttatggtttaataataatggtaatgatgttgaaggtggatcattattactcacaggtggttatgatggttatatgagattaagtgatgttagattagatgatgtttcaagtaataataagaaattttcatgtggtagtgaatatggtgaagaagttgaaagtatttctaagatgggtgaatattatgtaatgggtggatgtgattcaggtaatatttattgttatgatattcgtaaagatgatgaaaaaccattatggacattacatgcacatgattccggtattagtacattaagtagtaataaggaaattccaggattaattgcaacaggtgcaatgggtgaaaaagttgttaaagtttggaatgttaaagataataaaccacgtatgatattaagtaaagattttggatgtggtaatatattgaatagttcatttgcagatgaaattgaagtttcaggtaatttaattattggaggtagtaataatggaggattaaagatgtgggatgtatttagtaatgctacagtacaaaaatcatttaaagaagaaattcatgatttacagaatagagcagttgaagaagcaaataaatatggacgtgtgagtcgtattgctagaaaatataaacgtggatatggtgaaagtgttgttgaacctgaagcgggtggattagaggcatcagaggaagcagaggaagatgaggaatagacatgtagtttatatagtcctagatagaaagaatataaatatcgtataaaataatcaacataatacgataacgaataatagttagtaattccagccctctcattggtgcgattagagaaaagcgggggtgtttagtctttaataagggaaagtcattacgtaatttgaacaatggttttttttgctataaagagaagcatcatcccacaactggtaaatgacttttaattgacttttaaattggtctttgatatatactttcttgcttctcttcttttgggtacacgctttgtatctattgataagtaatcatcgttatactatatattaatctcattttctttataatatatcttatcgcatagattaaatggctataattaaatcagatccactccttgaatactcggagtactccgataataattcaaatgatatttcaatttcatcatcatctgcttcatcaatctcatctggtgatgatgttgaacaatattcaatctataaatatgatgaagttccagaaaataaatcttgggcttcaactttaccaactcaaaaaggtttatataaccctgaatacgaaaaggataattgtggtgttggtatgtattacaaaacaaaacaaaacttgctttttttcttttcttcttttaatacattatactaacatatatgataatattaatataatataggtttcgcttgtcatattaagggtgatgcatcccataaaattatctctgatgcaaaataccttctttgtaatatgacacatagaggtgcagttggttcagatgcaagagatggtgatggtgcaggtgttatgacttcaattcctcataaatttatgaaaagagaatttaaatatcattgtgatgttgaattacctgaattaggtcaatatgcagttggtaatttattcttcaagaaagatgattcaatttatgaaaaatcaaagaaaacttttgaaaatattgctaattctttaggtttaagagttttaggttggagaaatgtacctgttgattcatcaattttaggtcctgctgctttatcaagagaacctcaaattattcaacctttagttgtcttaaaggatgcctatggtacagattcaaaaccaattgaaatatcaaatgatgaattcgaatctaaatatcaaaaattattcgaaaaacaattatatatcttaagaaaacaagcaactcatacaattggtttacataattggttctatatttgttcactttcaaataaaaatattgtttataaaggtcaattagttcctgttcaagtttactcttactatcatgatttagttaatgctgattatgaatgtcattttgctttaggttcattcaagattctcaacaaatactttcccatcttgggatagagctcaacctttaagatgggcagctcataatggtgaaattaatactcttagaggtaataaaaattggatgagagcaagagaaggtgttatgtcttcaaaactttttggtgatgatatggataaattatatccaattattgaagaaggtggttcagattctgccgctttagataatgttttggaaattttagttataaatggtgttttatcattacctgaagctgttatgttattagttcctgaagcttggcaaaataatgaacatatggatccaaagaagaaagctttctatgaatgggcagcttgtttaatggaaccttgggatggtcctgctttattcacttttgcagatggtagattctgtggtgctaatttagatagaaatggtttaagaccttgtagatattatgttacaactgatgatataatgatttgtgcctctgaagttggtgttattccaattgaatctaaaaaaattgtcacaaagggtagattacatcctggtagaatgttattagttgatactaaggaaggtagaattgttgatgatagagaattaaagagacaagttgcaaatagatttgattttaaagcttggattttatcaaatatgattacaattcctgaattaattactaaattaaattcaagaggtattagtttacaaactaaagttgattcagatgttaaattaaaggatgatcctaaattattagcaaatggttatactttagaacaagttttatcaattttagttccaatggtaaatgttggtaaggaacctttaggatctatgggtaatgattcagctttagcttgtttatctgagcaaccaagattaatctatgattattttagacaattatttgctcaagttactaaccctccaatcgatccaattagagaaaaaattgttatgtcattagaatgttatgttggtcctcaaggtaatttattagaaatgaatcctttacaatgtaatagattaaaaatgtcatcaccaattttatcaaatgatgaattattagcattaaaggaaataaataaagttgtaccaaaatggaatgttactaatattgatattacattcgataaatctgaagggttaactggttatactgaagctttagataggatttgtgcagaagcaactaaggcaattgttgatgattctcaaattattattttatctgatagaaacttatgtgcaactaaaattgcagtttctgcattaattgcatcaggtgcagttcatcatcatttagttagacaaaagcaaagatctaaagttgcaattattgttgaaactgctgaagcaagagaagttcatcatttctgttgtttagttggttatggtgttgatggtattaatccttatttagcaatggattcactcattaaattaaataatgaaaaattattaaccaaagaattcactaatagagaaattattgaaaattatagacatgcaattgatgatggtattcttaaagttatgtctaaaatgggtatttcaactttagcatcatataaaggtgctcaaatttttgaagctttaggtgttgataattctgttattgatagatgttttgcaggtacagcatctagaattaagggtgttacatttgaatatattgcacaagatgcattttcattacatgaaatgggttatccaaatagagataccattaaaccaaagggattacctgaatctggtgaatatcattggagagatggtggtgaatcacatattaatgaaccagcagcagttgctaatattcaagatgctgttagaaataaaaataataaagcttatgaagcttactctaaaaaggaatatgattcaattaaaaattgtacattaagaggtttactagattttgattttgaaaattctaattctgttccaattgatcaagttgaaccatggactgaaattgttagaagattttgtactggtgcaatgtcatatggttcaatttcaatggaagcacattcaaccttagcagttgcaatgaatagattaggtggtaaatcaaatactggtgaaggtggtgaagatgttgaaagatcaaaaccttcagataatggtgattcaatgagatcttcaattaaacaaattgcatctggtagatttggtgttacatcatattatttatctgatgctgatgaattacaaattaaaatggctcaaggtgcaaaacccggtgaaggtggtgaattacctggttataaagtttctgaatcaattgctaaaacaagacattcaactcctggtgttggtttaatttctccacctcctcatcatgatatttattctattgaagatttaaagcaattaatttatgatttaaaatgttctaatccaagagctagagtttctgttaaattagtctctgaagttggtgttggtattattgcagcaggtgttgcaaaggctaaggctgatcatattttagtttctggtcatgatggtggtacaggtgctgcaagatggacaggtattaaatatgcaggtttaccatgggaattaggtttagctgaaactcatcaaactttagtcttaaacgatttaagaggtagagttgttgttcaaactgatggtcaactgaaaactggtagagatattgcagttgcttgtttattaggtgctgaagaatgggggtttgctactgcaccattaattgcaatgggttgtgtttataaccgtaaatgtcatacaaatacttgtccagtcggtattgcaactcaaaatccaattttaagagaacaattcaagggtactccagaacatgtcattaatttcttctattatgttgctaatgaattaagaggtattatggcaaaattaggttttagaactattgatgaaatggttggtagagctgaaaaattatatgtcagagaagatttaagaacaactaaaaatgctaatattgatttatcaccaattttaactcctgctcatacaattagacctggtgttgcaactaagtgtgaaaagaaacaagatcatagattacatgtcagattagataataaattaattgatgaagctgaagttactctggataaaggtttacctgttactatcgaagctgaagctattaacactgatagagctattggtactacattatcatacagatgttctaagaaatttggtccaacttctttacctcatgataccattcatgtaaatattaaaggttctgcaggtcaatcatttggtgcattcttagcatcaggtattactttagaattagaaggtgattgtaatgattatgttggtaaaggtttgtctggtggtagattaattgtttaccctccaaaagattcaacatttaaagctgaagaaaacattattattggtaatacatgtttatatggtgctacttctggtactgccttctttagaggtattgcagctgaaagatttgcagttagaaattctggtgcttatgcagttgttgaaggtactggtgatcacggttgtgaatatatgactggtggtagagttgttgttttaggtaaagttggtcgtaattttgctgctggtatgtccggtggtattgcatatgttttggatatggctcaagattttgatcaaaaagttaataaagaattagttgaattatctactttaactgatccatcagaaattgccttcttaagaggtttattagaagatcatagacattataccaattctgaaattgcattaagaattttgaatgatttcaatagattcctgaaaaaattcgttaaagttttaccatttgaatataagaaagttttagaagaaaaagccaagaaacttgaagaatcaaagaagaaagaagcttcaagttatttctcaactattaaggaagatcctgaagctgatattactggtggtgaattctctaagccaaaaccaactaagaaacatgaacctaaagttttagatttagaagatacaatgattgatattgaagcagaggaatccaaagctgttaaattagataaagttggtggtttcattaaatactctagaagacatgaaaaatacagaccagttaaatcaagacttcaagattggaaagaattatcttcaagattaacaaaggatgaattaaaattccaaactgctagatgtattgattgtggtattccattctgtcaatctgatactggttgtccaatttctaatattattccaaaatggaacgaattagttttcagagatagatggtatgatgcattacaaagattactgatgactaataatttccctgaatttactggtagaatttgtcctgctccatgtgaaggtgcctgtgttgttaatgtttcaggtaatgcacctgttggtattaaatctattgaagctggtattattgatcatgcattcaaggaaggttggattgttccaactccaccaaagattagaaccggtaaaaaagttgcagtcattggttcaggtccttcaggtttagcagctgctgatcaattaaataaggcaggtcatactgttacagtttatgaaagatcagatagattgggtggtttattaatgtatggtattccaaacatgaaattagataagggtgttattcaaagaagagttgatttaatggaagctgaaggtatttcattcattactagtactactattggtgaagatattacattagatgaattaaagaaacaaaatgatgctgttattttagccattggttcaaccattccaagagatttaaagattccaggtagagaattaaagaacattgattttgcaatgactttattaactgcaaataccaaagcattattagaaaatgatcttgaaactattagagcaaccattgaaggtaaaaatgttattgtcattggtggtggtgatactggtaatgattgtttaggtacagcaactagacatggtgctaaatcaattgttaattttgaattattaccacatccaccagcagaaagagctaaggataatccatggccacaatggccaagaattttcagagttgattatggtcatactgaagttaaggaacattatggtaaagatccaagagaatattgtattttatctaaggaattcgttgatgacggtgaaggtaatgttaaaggtattaagactgttcgtgttgaatggaagagatcagattctggtgcatggcaaatgcaagaaattccaggttctgaagaatttttcccagctgatattgttttattatctatgggtttcattggtccagaatcagataatttgaatgttgaaagaactaagagaggtacaattgcaactcatgaatctacatcatatcaaattgaagaatcatctaatgttttcactgcaggtgattgtagaagaggtcaatcattagttgtttggggtattcaagaaggtagacaatgtgcacgtgaagttgatgtttatttaatgaatgaaaccagattaccaggtaatggttcaattgaaaagagagattatcgtctcttagaggaacttgcagctaaagtttaagttaataggacgctagtttgtattcactattttttattattcatatattaaaatttttattattcatttacattttgtatttctgtttgtttatatcatttataacttaaattattattcttaaaaccacaatgtgtgtattatcgtcaatcgaaaaattaaattacgtaagaaatttggatatttttcaatttcgctttctttgatattggaggtgggctgctcagaaaatctgctttttccattttaactgttcttctatcttctttttgtattagttttatatcaattgataccaaagatacaacatataaagtacagtactatgataagcagataccgaatattttaatattatgacttttatgattgtatcatcttttttagatcaagtttttgatctgtaaccgccactcaggggtaaaatgaatgtgccttggttttaatattcaattgtttttatttttgctatagatttttactactaactactaacatatttacatacaggatttcaattttgtagccattaaatatgattacccactgtgctacccatacaacaacattgtcaaattagtggcaaaatcgattcactacatgaaaattaaaatttcacaatatattacgtaatataaaattgttcagtgggaaactaaaaattacttaattaggaaaaataattaaataaggcatcatcatctatatagaatgaatattggaccatggaattgcccatttagtagaatggggaagagaggaatcatctttttattgatctttcaccttcatcttggtattttttgttagtatttagaagattccccttttctgattgttttactttcacttattccatcccctttctttcatttctttaccgtttttggtcctatttcatttattttcatttcatttaacttcatttgatttatttcatttactgccactaagtactgtcgcatataccccggtttattgtttactggatctcttatttttgaattaaaaagtttctgaacccaattcgatttaagcctataatttaattataagaaagttattcattaagtttatcaaaccaatttgttattaacctttaaagcactttctattttagtttactgaaatctttgaaatgcgtttatcatctgataaattaagggttgttaaccaaaccactttggttgatgttgctccaactacattaactgtttgtggtactgcccaaatgaaagaagctagaaattccaattatgctaattttaagaaacgtgatttaagaaaagatgcaactgatattcttaaatttcaacttttaatgttttatcaatgggctcttacaagatattgtgttgaaaatccattaagagttaaacaaattagaaaagatgcttttcaaattactgtagataattttgatattgatgatgctgaaattgataaatatttagaaaatccaaaatttatgtggagattctctgttagaaattatgaattttttcttacttttttcaaatctaacaaaaaatcaaaattattttacagtagatttgatactgctgatattgacgatagtcctttgcttgactatattaagccaattaaaaattacatgaaggataaattcaagaaaacatttacttccaaaaaagttactgcaatgaagaaggcatatgattttgatattactttaattactaactttatgaagaagcactttgaaccacttaatcaatttaaaacttctgaattcgtattttctgatgactattatttacatgaggttcaacctgatgcagagtatgaagatttcatttgtcatttaatttgtggtcaaacaaagaattttgtttctccattattaaaatggcatattgaatcaaattcaattgaaaagaaagatactctctacaatttcaaatgtgaaaaaattgagacttcaacttctaataatttacaaactaataatattagtttaacaaattatgaagatctatcatttagatcttaccaaactgttaaaacttactcaccaaaagttaaacaaaaccaaaaaaaaattaaatctgtcaaccaaacccctgttactcctttaaaatctgttaaaaaatctattaaatctaaacctgtctattctgtcaacccaaatcaatcaattgatgaaaattctattctttcaacacctattagatctccaagatttattggtgttaatggtagaactattttatcaactccatccacttttaatggatataatccatacttatcaaaatcatcaattaattcaccatcaactattaattctaatatttcaccaattaaatcgagaattagaaaaactgataaaaattataaattaaaaccaattatcaaaattgaaattcctgaaaaattattacatgcttatgatttcatgtttcttactaataagaaacaaaattcaactttaagattagaatgtattaaagatattattgaacatcatatgaaagaatgtaaaactattaataaattatatcattcagattggttacatgaatatttaattaatgaaaacagtttaaaaagtcaattttacaaggcagctgttgatacctttggtagtaaatgtcatgttaattattttagatttgatgataaaaatggaatttcagttagaactggttgggcaattccatgtcctccattattaagacaatcaatttcaaataagattgtcaataaaattatgcatcaatatgttaacccttcaaaagaattatacaaaatttacaaggaatctaaaattggttttgaattgcattataatccaactacaattattgaaacttctccaagaaataatgataatacaagatatgattgttctcatggtattaaaatttccaataatggttttaatttttctgctatgattgttcctgaagaattgaattataattataaatcaattaagagaactattactgctgatatttcaactattaataattcaatgaatccaccaattatgaatgctgcttctaaatttaataaatttcaacaaaattgtattgctggtaaagattataatggattcaatgatattatcaattcattaactcattcaaatttattagatgttaaactttttgaacctgaagaattaaaatcaaaggatttccaaaaaattaataataatgttaagtttgttgatgaatataatgtttttgttgaacctgaacctttattagtcaaaaatgttaaactaccaatttatgattcaattcttgatgcaaagccggttcctgaaaattggtcaattcctattgaagcaccaaatattccacttgattatgatcgtcgtcttttacgtgatgttgatgattctgatactgaaattgaaactgaaactgaaagtcaatatgatagtaatactgatgttgatgatgatgaaattgctactgataataaaattgctactaatgataaaattgctactaatgataaaattgctactaatgataaaattgctactaatgataaaattgctactgaaaatgatattgctaatgatggtttaaatgctggtaatgctggtaatgatggtattgttggtaatgatggtattggtaataatgatattgttggtaatgatggaattggtaatgatggtattgttggtgatgatggaattggtaatggtgctagtggtgttactgatgttgttgttgctgaaggtgctattgctggtggtgttactggtggtattgctggtggtattgctaatggtattattgctgaaggtgttactgatggtattgctgatggtgttattgctggtagttctaatgctgatgatgattcaactgatgattcaactgatgaagatattaatttaatttcacctgatttaattactaaccctgttgctactacaacttgttttgatacatatgaaattttagaaaatgcaaaaaacaattcaacaaacacttcaactgatgataataataaatttcattctgattttgattctaaatttaattccattagaaacattattaatccaacatcaacatttactaacttaccttcaacacctactaatccaaatagaaatattaattttaattcattaacaaatatcaattcctcaccaagtcgttccattaataattccaatccaacaaataaattaccatatgcatatccaactaatgctaatgatttcaataataaagattttttagctaaaattgccaaggcaaaaaagaataaatataaaaagccaaataaattacaattgaaatataagaaaggtattaaaaaaattgaaaattcagtagaagattatattgaagattttaagagaagaactgggaaacttgaaccaccaccaccacgtaaatttattggtatgattcaaattgaaaattctcataaaatacttaatttaatttcaaaagatttaagacaattaatgaatgttaggattgatgagacaattggaattgaatttgttgattttttaggatttttaattccaggaaatgaacatttcattaaagaaggtagtgagtcaaaattattaattaatttagaatcaaaattaaatgaaatttataaaatagtttatccaattatgaataggaagaagcttaataatatgtataacaaattttatgttggtaataaagtatcagatgaaattagagaagagaagaggaaaggtgaattaacaaataaggttataccattatttatggaagaatttaaggaagattatggtttaaaatatcatattgctcaatttttatatcattattatttaaaatattccagaaattattcaaatgatggaaaaaaaattattaaatattttattgaattacaaaataagagtacatataatgccaagatgatttatttaattgcaagagatagatttatgtgtcaactttggtatttatttgaatcatatgttgaaagggataaagaattaaattattattcacattttttcacatatgatttattttattatgaatttattaatgaaaattcaattttaatgtcaattaatagatataattatttaaaagaaaaaataagaagagcatatgagaaagaaattgagattttaattaataaaagaagaattagtagaatgaatcaacttaaaaataaagttaattaaaatatttgttattgtatttgttattgttattaagaaaaaaaaataaaaaagaaaaaaaagtataaaagtattaaaaaattagaaaaaaaaagagaccccccccccccccccccccttcattgctaaataataaaataattgaataaaaatgaattgaaaagaagaatttaattcaacaaaaaaaaaaagaaaaacgaattgaaaagaagaatttgattcaaaaacatggtgataaataagatggtactgagaatgatgaaaatgatgatgattatgataaggtagtaaatgatggtaattgattgatgatgatgatgatgaatagaatagatatgaaacagattttttgaaaaggaaaccccccttagaattatgaattatgaaattaaaggacggaagattatatttgacagtaataaaatttcagaacggagctggtaactccactttaataataatttaataattttaaaattcttttgatgagagtgcttagaccctgatatggtaacagatattggggagctacatcaaaagaataagtcttagctagttataataataatgtgtaataaaattaaaaaaaaaataaaaaaaaataattatttctcatgtagcttcgaatctataattaaaatcgaaaccttcagaataagtattcattgaaaatttattattctgtaaattataatttaataaaagataaccattttcaacatcacaaatattataatgccaacaattttgaaatgaaacataatataaatcattaatatgtcgtataatttgatttaattcatgttttgataataaatttaataaattattaaaatttgaagattgaattgaattaattaatgaaggagataatgataatgaaatattttcatcagtattatccgttgatgatgatgatgatgatgatgattttgaaattggtattttatcataaattgataaagctaaatgaatataacttgctaattgataattattaaattgtgataataatttttcatattttttttgaattttaatccaaattttcaataattttaatcttgaatctgagaatttaattttaaaagtttcaaatgatgtatttattgttaaatcattaaatgatgaaatatatttaaaatgaagagaatttgatatagtataatcgaatttaaagaatattgataaatgttctaataatggttctcttgttggtgattgatgagtaactaagattttaattgatttattatattcatttggattattttcagaatattccaaaagggaatgaaataatttacccaattgaagcatagttatccaaatattaccaggatcaccagaaattggtataattgaagataaaggtattatattatttgaagtaccttgatgaaataatttatgataagataatgaaccacctattccagctaataagattgattgtgatgaagaaccattattaaattttattgaatgtaaattataatcatcaataatatgtaaattattaattttataagtaccatttctaaatttatttataacatttgaatcttcacacataccataaatagtataaacagggatatttaaatttttattaccattaatgaaatccattaattgactaatttgttgatttgaatttagtaaaattgattttaaattaatattatcatttgataaatgatgaactgaatcaccttgaacttttgataattgagaaatttttaaaattaaatcttttgataaaagtggtgaaaattcaactatatgacgtaaataagattcatgaattttagaaatactttcattatcaataaaaccaaaattacctgtatgaattataaaatcaggattatgaattgtggataaagtattaaaataagataaattacctctaatatctgcaactactaaaattttaacattattagtattataaattgatatatgaggatttgtcattggcatatgatgattgtaaaaatctaatatctaataaatttgtaaaataaacgtttattgaagattttcacttaaagtataattaattaatgcggtaggttttttcattattaattatttaatagtgaaatttaaaattttttgttgattacgtaatggtcacgtgatattcttattacgtaatttattttgaaatcacgtgatttatttattacgtaatggattttaaatcacgtgacttattgattatgtaatattgcttatgtaatatttattacgtaattattttttattatgattattatcaattacgacatgaattttacgataataataataataataataataataataataatattattattaaaatgttgggctatacatacactcttcttttagcaaatgaattcaattaactatataacttcaacaattcataggcgaagtagtttggataatttaaataataatattaatattaataatattgaaaatgatactgaaaatgataataatactttaaatactgggatagatcaaaaaaatatcaacactaaacctcataataatagtataatacacagaatactattaactatatacaatacaatcatttttataccaaaattattaatttattatccaatttattatattattaaaattttaatttacccatttattaaatttcattatcttttattatacattttctattattttacttatactcctccttcaattaatgatacttttgatgattcaatatcaatacccaattctagtcctttaatattagaaactcctccttctagttcttcatttaaatcttcaatttcaacaattttagaagaatcaatggaatttaattcaaagaatgaatcatataatgatgatgattttaaatctccattagatataccaaatccaatagaagatcctaaaatagaaaaaccaatatctaaacaaaaacaaatcaagaaatcatcttcatcttcatcttcaaagaaaaagaaaaaatttatattcccaaaattattatttaattttaatatatcaaatcctccaaaaaatttaacaaagaaaactttagtacttgatttagatgaaactctcattcattcattatcaagatataattctttaacaatttctaaattaaagggtaaatcaattgaagttaaagtaatgggtaatttaccaactttatatcatatttataaacgtccatatgttgaagaatttttatcaattgtttatcaatggtttgatttaatttgctttacagcttctatcaaagaatatgcagatcccgttattgattatcttgaagaacaagtattgatgaatgatataatgaaaaaatatattaaaaactctaaattaaatcaaccaatgaaaatttttaaaaaaaggtattatagaaattcttgtattttcatggaaggtaaaggttatgttaaagatttatcagttttattagatgataatttgacacagaatataaacactcctacaagatcgagaacttcaagtatttcatcaaatatttcaaaatcaacgctagattattcgaaaatattaattattgataattcaccaatttcctttgtacgtcataaagataatggtttaatgattgaaggttggattaatgatcctgatgataatgaattaattaatttattacctttacttaatagtttaagatttacaagtgatgttagatgtatactaagtttaaaagatggtcaaagagcttttaattattaacatattatatgtatatgtacttacttacttattaaatttaatatttaccaaattattaacatggttttataatatttaaattcaatccagttccaattttatgatttataggagtattattattttcttcatttacctcatcatcaatttcaacaactttattctttgaaatattatttaatcgtttactcatctcttgtaatttattttcaacattttcttgttcattgtttactattttattcctatcatttaatttattcatagcttcttgaattttctcttgtttattccttaattcacgttcagctatctcaacttgttcaattaatgaatcattctgtaattgaattgtattagtcatctccttatatatttttgaattattcatatcatttaatttatcagattcaagttgtaatatttgatcagttttactaactaataattttttgtaaatttcaatatctgattttaatgattcaaatttcctaattgattcagttaatgatattttaatatcaattatattacaattatcattattttcccttaaatattcaatagtttcattaagtttaatattctcattctttaattcaatattctccttactcaatcgacaaatttcttgataattaatatcaatattattattattattattattattattattattattatcactcttaccttcattattacccattgattcaatttcagtctctaattgaacaatcttcttcaatgcattgatatatttggatttccacgttttggtctcctcattatcattaccattatcctcacttttactctctttttcatattcaattttattaattatagcactattatatacatttttagccctctgtgcaaatcttaatgatgatatagtttcatttaaatcttcactatctgatgaacaattaattataattgcagtttttgcattaccacctatagaattttgtaaaattctagttaatttagaatctctatatggtatatgatttgtattattattattatgaagatttccatctctctcacttaatgaattaattacattacttaatgcagataatgatgaattaatattaattgtttcctttaataaattattacctgatttatttaatctttcagaacctgctaaatcaactaaaaataatgtacttttaaaaatttctttcttatttatatcatctttttgaacatttaattcaattcttaaaattgtatgacttcttgaacttttatcattcatattggtttcagctatagttttatttgaattaccaatcttaattacattttgaacatcttcaacacttgcaacataaattttctctaatccttcaacatatactttattctcattattattatcaattatctctcttataaatatattttttgaattagatttaggattcagtaaatcaattatactttcattatatatctcaaaatatgataatccaatagtatattgataagtaaccggtgattcatcaatttccaaaaaaatactcttaaataatcttggtattatacctatttcattctcactataggattcatctcctcctgtcatagtatatgttttcccactacctgtttgtccataacatattatagttatattatatccatgaagaaatgatggtaatatcggtaatattgtacgattatataattcggattgtgaaatatttgatgtgaaacattcatcaaatttaaatgttaattctcttgtatttacattttcagggttattacttcttttatattcatttcctgataattttgggattttctgtgatgttattggatgaatattgattgttgaattatcaattatttgaaaatgtttgggtgaaattgatctatttctaagtttattattattattattaatttcattatcatgtaattcaatattttcttcatttagaagttcccctctcaaaggtctaaaacgtacgtatactttaatcgtatcggaaaccattgatcttgtgtttatcgttagatctataaaagaaaatccgtttctttatcaatgttttgatttctgataatttcatgttgctaattacttaattgtttatctaatcgttgtttacgtaacagttttctcttggaaatgggcgcgtcgttatttttgatatcagttcaaaataataagattataccaactaattgattaaattaatagtaattaaagtgtctatattttatgtataaattatatcaatataaaagttagaaagttagaaaaagaaagcccaaattggaaattatatgtaaaaaaatttattaaaaaccgaattataattataattataattgaaaaatatgcaatattgaaaaatattattaaataaagtgattgaatgaataaacgatgaaataaataatttcagtgtattatgggataaattaaagaataaatgcaaatagtgtattgaaaatgaaaatgaaaatgaaaaaaaaaaaaaaattccagatttagaaatttaaatcaagaatgcaagtaaaattaatgtaattggtgcaaaacctgaaccaatcttgttagctgcaccattataaactgaaacttgtgcagatgaacttgcttgtggaacaaatgacgttgaagtgtaatcattattacctgggtatacggtatttgatggtaatgtgacataagttgcatcagtatctgatgaatttggactaactggtgttgctgatgtagttgcagtaccaattgtacttgattcttgaactggtgaacctggtgtagttggggtaactggggcagttggattaactggagcaattggagtagttggtgctggtgtaatagattctgatgttgaatcaactggagtttgttcataacaaacagtagtagtaacagtaacaccatcagtaacagttgtaacagctgaattgaatgtagtatggtgacatgcggtacagtaaatagttgaagttgttgtaggttcaaaagttgaagtagattgtggaaggttatcaactggagtttgttcataacagactgtggtagtaacagtgacaccgttggtaacagttgtaacagctgaattgaatgtagtgtggtgacatttagtacagtaaatagttgaggttgaggtggtttcgacataatcagttgaaatagtttcagcaggtgtacttgatgttaaagtattttcagtagatgtagttgaagctggagtagtttcgaaaggatcacttgaagttgatgcagtttcagcaggtgcacttgaagttgaagtagtctcagtagatgcacttgaagttaaagtagtttcagcagatgcgcttgttgaagaaccatcagtagttgatgaaataattggaatattttcagaagttgataaggttccaatttcacagtttgaaactggagtaaaaacaataacagtagtatcagatgcaacttcatcaacttgagtaatttgggttgcaacacaatcggtagcaacggtagtaatagtagagataacatgtgttggatctattgatgaagtgaagcatgaagcagctggagtttcaataacttgtaagaatgcagtaacgccaccagagacaacagtacttaaatattcagcggatttacaatcagttgcatcaatagtagtagttaaggttgtgatttcagtacatgtagcaggtggagtttcaacaacaactaatgtagcattaatatatttaccatagtaatcagtggtaccaatgaatgtagtgtatgatgtgaattcacaatcaaatgcaacttcagtagtggtaaatgcattagggttacaagttggggctggagtttcttggacaacgacgacaacattggaaactgaaccattagctaatgtagttgctgaggtggtagtatatgtagctgagccacaaccagttgattcagttgaagtaattgtgttgagtggtgtagaagatgatgataatgatgctgatgaagatgatgaagataatgattcacttgaagaataacatgaagcaggtggagttccaacaacaacagctggggttgtgataacagatccactaatagtaaaaacagttgttgtagtaaatgtttcaggtgtacaatcagtattagtagctggaatagtaacagttgtatggaatgcatcgacagagctacatgaagtttctggtatttcaacaacaacataaacagtaccttgaactgagccatttgatgctgtaactattgaagatgttgtaaaagttgattctgaaccacatgtagatgcatgagatgtaacagtagaagtgataatagaagtgactgaaacagatgaggtacatgatggagctggagtttcttcaacgacaacaacgactgaggatactgaaccattggataaagtagatgctgaagttgtagtgtaagtagatgaaccacatgcagttgagtcagttgatgtgatagtacttaatggagcacatgatggtgctggggtttccttaacaacaacaacaattgatgaaactgaaccattggataaagtagatgcggaagtggttgtataagtagatgaaccacatgcagttgagtcaatagatgtgacggtattcaaaacagtggttgatgatgatgatggaactgatgatggagctgatgatggagctgatgatggagctgatgatagagctgatgatggagctgatgatgaagctgatgatggagctgatgatggagctgatgatggagttgagattgtggttgatgatgaggatggtgatgatgatggagctaaagatgatgaagtacatgatctagctggggtttctttaacaacaataacaacagatgaaactaaaccattagataatgttgaagctgaggttgtagtataagttgatgacccacaagtagtggagtcagtagatgtaatggtattcaaaggagctgttgatgataatgatgaggaacatgatggtgctggtgtttcttcaacaacaacaatgacagatgaaacaacaccattggacaatgtagatgatgaggtagtagtgtaagttgatgatccacaagcagatgaattggttgaagtgatagtggttaatggattacatgatggagctggagtttcttcaacaacaagaacgtaacttgaaactgaaccattaatgaatgtaattggtgctgtagtagtatatgttgatgaaccacatgttcgagaatcaatagatgttgaggtacttaatgaagtacaggatggagctggtgtttccttaacaacaatgacaacagaagagacaacaccgttagataaagttgaagctgatgtagtagtgtaagtagatgaaccacaagcagttgagtcggttgatgtaatagtgtttaaagaagtagttgttgaggatgatgatggagctgaggatgtgattgatgatgaaaatggtgatgaggatggagctaaagatgatgaagtacatgatggagctggagtttcttcaacaacgatgacaattgaggatagtgaaccattagataatgttgatacagaagtggttgtataagttgatgaaccacatgttgttgaatcagttgaagtgattgttctcaaagtggtacttgatgatgtggtagatgatgatgatgaagaggaagtagttgaagatggcaagtagtaacagatacttgaaccagtggtaacaaattcgacaccaattgtagtgactgcgccactgacagtttcagttgaaaaactggtggatgtggcttgtatatcacaatcatcagtgaaaatggtagtggttgtccatgatctgattggatcagtagcaggaacttcaacaatgatctcggatgtagtgatatgaatattaccagtgaagatagtttcaacagttgtataagttgtagtgaatgattttaaccatgttgtagttgatgtggaaattgctggtctattaacagaataataagtagttgcataaacacttaatccatcagttaatgatgatgtaaatgtatgagtttcagcatatggtctattccaataaacaacagtttctgaatgtgatggaatttgttcaatataatatgtggatgtggtccaacccatattggttgcagttgtaatagtaccagtatattttttattccattctgtataagatactgaatatgaaggaactaagacaacttcagcataataaggagtagcaccagtggtaattaatgacatttttgttgtaattccatagactggaccttccatagtagtagtttcagtaattgctggaccttcaatttcaacataagtgctggtagttccacgcacggttgtctctctagtagtagtttgaattcgagtgtgtgttgaatcaaataagtatgaagtttgaagttgtctgttatagatatagacaacatcatcagtttcaacattaccatttgaattagttacaacgacacctgtagcagtagatgtgaataaataattctttgaaggatcttcagtgtatatagtcatttttgggggaccttgaataataacaattccggtttccgttggtgttccattagtatcagtagtagttaaagatgaagtataagtagttctaccatttgaagtccatggaatataagttgtatgtaatgcaggtaatatgacttgagcaacagtagttgtaattgttgaaccattagtagtaattgtagttgaaacagtacgagtagcagtaactggattaaaaccgttagttgtaatagtagataatgaaggacctgcaactaaaatttcagtaactgttgtccaaccttgatcaattgtaattgaaccagttgaataatcagttctatcccaataagaataagtagtttgtaaagcaggttcttcaactaaaataatatgagtagtaacaactgtaccatcatctaaagtaattggcatagtagtttcaacaacatttctataaccatttgtccaagtggttgtataagtagataattcagggacatagacaatattaacgtaagcaccatctgtttgaccattattaacatatacagttgtaccactacttgttgaagtgattgtattagtccaagttgaagttcttgtaaaagtggtttgaacaacagattcaataccaatagtaacaccaacataagtaacaatttcattattagaattagtgtaagtcattggtttataaacagttgtacctggcattaaatcggtattataataggttgatgatgaaaaacttgttgttgcataaactgatttacattcattaccttgaatttcaccacttaattgataaacttgattattagcatttgcaccacttggatctttaatatcaaaatttaaggaagaatctgagactgcattaatataaacaattctaagtggatacatattaccaccttctaaataaacataagactcttgtgaagctgaagcttcattccaagctttacttgcaaacatgattgcttgattactttgacctaattgacctaattgtggattacaacaatcaaaacctccagtacccatccaaaccatagcagattcatcgacatcattcattgtaaatgtataaataccagtattttcagctataataaataatgaggtgaatgttagtaaaatgtttttttataattaaagaaaaaaagtagttgttattgacacataccataaaaataaccagttaattcaagagcaaaatttgtgattggaatttctgcaccaaataattcaccagatgcagcaattgcaaaaccatcatttcttgcaaaatttggattttcaacaattggaacagttgtaactaaacctggatttttataattaccattataataatttgtattagtataagctaaatcactgagtgtataagaataaatattagctgaataaccattaacagattgaataccagaaatggaacaaccttgatttgcggaatttaatttaccttggaaatcagccaaaactgttgatgaccaagatatagctaatgaagctaatgaaaaggttgaaaaacgcattggttttaaaatagttttatatctttcgatgatcaaaaaaaagatataacatagaatataaatagaaataaaataaagtaagtaaaaggatggtaaaataaactaaaaatagtgcagttaagttgatatttatacaatattagaaggtaaaatttgagtaactccgtgctaaaaggagttttattttagagaataataaaatcaagggttcattctgtaatcataatcatgaccatgaccattggctgagaaagtttaaaattatccacaagcagaaaaaaaagaaaagagaaggacaaagatgagttaaaaagaaggtttagataacaatttttgaatagagctattgttcaaaatcaaacaaaatagattgtctcttagtgaaattaatatatttctgcaaagttacttaaaaattttatatgtagaatggcaatactaagcgaactatagggtagcaacgagcccacggggaaggaattatttggtcataagtgggaaagtacctttaaaacggtttttgttttttatttttaggttttattatgatgtaataattgattactatggaacaaaaaaggtgaaaaatgatgacatcaacgaaaattattaaatattaacctgcattaataaaagcgtttaatgcacggaataagtaataaaatattaaattaccatagtaaaattaaataaggttttattccatggaattctatactgcgggaaatagctaaaaatagaagaaaaaaagaaaaagaaatttttaaaaaaaatgagggggtccttccaaatttggattaattaatttataattatgtcagtcttctgggtatattaacttacattttgatactagatgttcctatatgatttacttaatatactttcatctaccacaagtagttaaagcactgaaaaccctgtaaccgttgataatatttatttagtgggtaaataagtacgattaaacgaatcagtaagttctttaattaaaagctggaaaattagcggaaggatcgaaattttctgtctgttaaattttctgcctacttattgggagcttacacaatgggaaggttatggggaaggatggatcaacgcttaaatatttattatctattcaggcttttaatttttattgtagtagctgaatcatgacagagatctaggggttgaatttggatttgttttcattatcaagtctggatctttaacatatttttgaatcatcagtaattttagggaaagaaataacttaaaatacatttagtcactcaaaatttacgaatgcaaacttccttcttcttattgaatgtataatgctgatccacgtcaagtttttaaaatatatgccctctatctctattacttaaaagcttgttcagttttatatatacgttttctctcaaaaaaagctgattttatttaaaagaacccttttaatttcatctatacgtcattgaccgtttcccttcaactaaatttagtgtacccatcaatatattattcttatattcaacttaactcttattgcatggatttattctataaaaagaaattaaccaaatatgtcaatatacattcaatgacgtaacaaaaaatatttttaatttgagttaactaaaatttatttgatttcatttctacactctatatatttttgatccttcttcaaaaacgatatacttatcacaatcgtagaataactaagttaaatactacatgtacttttctaattataaatcaatctgtattccaacaccaaaaagctaaagttgataatcactttccttttttcagcaaaataccaaaagaatttaattgtcttggtaacggtaatcaacctctatttctctcttgagcatatgccattcactatggtaatcatatatatatatatagtgggaatggttgataacttctttttattcaagttgcatatatataatatatacggaataaatcatagtaaccagctaaaaaatttgcatgatttatgaactatttcaaagaaataattgttattattattattattataatgataactatttgatcactaatccaaattataaaaacattgccttgatgtaaagagtacatccacgttttcttctttttcatgatctttgattcatcaagctacaatgtatcagtacttacattcagtctcattgacgtcctggttttaagtcacttgctgttctcttatcattttgattgtgtttttaatagtgggtcaacaattacaccaagtaataatgtatcactttaagttaaatgggatacatttgaataaaaattgaatttaaaatcatttatttcaagaagacattattttttttttcatttatatttcgccattatattgatatatgaattcataaattgattttgttttagaataaacaagagtaagaaaatttatatatagttaaggatagtaagaaattaacattcaaacatttaaacgtttcaaatacttcattacacgatttatctattttttaattacgataaaaaaattttaacaaaagagaacaaattaatttaaatcacaacgaagacattgtgaaattttatatagtaaaagtatatataagaagaatgcaactgtgaaaggagtatattttataacaaaatatacaaaaatgaattgaagtaaaatgaaattaaaaaaaataaattaaaataaaatgatcgagaattaaacgtatcttttttttatttttatttatcaactttaaatcattaaagcaaagaacataattgcaattggtgcaaaaccggaaccaaccttgttagctgcaccattatagactgaaacttgtgcagatgaagtttcttgtgaaacatatgatgttgaagtgtaatcattgttacctgggtataatgtacttgttacaccattaccttgtggagcttcagattctggggaatttggactaactggtgctgcaggtgttgtagtagcagtaacagatgtacttgattcttgagctggtgaacctggtgtggttggggcaattggagcagctggaccagttggtgctggtgtaacagcttctgaagttgaatcaactggagtttgttcataacaaacagtagtagtaacagtaacaccatcagtaacagttgtaacagctgaattgaatgtagtatgatgacatgcggtacagtaaatagttgaagttgaagtagtttcgacagttgcagtagattctggagcattatcagttggagtttgttcataacagactgtggtagtaatagtaacaccattagtaacagttgtaacagctgaattgaatgtagtatgatgacatttagtacagtaaatagttgaggttgaggtggtttcgacataatcagttgaaatagtttcagcaggtgtacttgaagtagtttcaacaggtgcaactgaagtagtttcaacaggtgcaactgaagtagttgttgagtaacaacttggtgctggagttaaaacaacaatggttgtaccagtagctgcagcatcgatttgagtgtatgaagtagcaacacaatcagtagcagctgatgtaatgactgaaattctgaaatctggatcaattgatgaagtagcacatgaagcagctggagtttcaataacttctaagaatgcggtaacaccagcagagacaacagtggttaagtattcagtggatgtacaatcagttgcatcaatagtagtagttaaggttgggatttcggtacatgtagcagctggtgtttcaacaacaactaatgtagcattaatatatttaccatagtaatcagtggtaccaatgaatgtagtgtatgatgtaaattcacaatcaaatgcaacttcagtagtagtaaatgcattagggttacaagttggagctggagtttcttggacaacgacaacaacattggaaactgaaccattagctaaagtagttgctgaagtagtagtgaatgtagatgaaccacaaccagttgattcagttgaagtaattgtgttgagagtttcagttgcagagaaacaagatgcagctggagttgcaataacaattgcttgagtagtaatagttgattcattgataacaataacagtagttgtagtaccaacagtttgagttgcacagactgagttcggagatggaagtgtaacagtgaaatggtatggatcaatagaactgtaacatgaagcagctggtgattcaacaataacatattcaattgcagaaactgcactatctgaaccagtaacaagaccttgtgaggtggtggtagtagcggaaccgcatgttgctaaaattgatgtaatagtggtggtgtagctagcagtttgacacattgcagctggagtttccttaacaacaataacaactgatgaagtagaaccgtttggaagagtagtttcagtagtggtagtgtaagttgatgaaccacaagtagttgagtcaattgaggtaacagtggataatggagaacatgtagcagctggggtttcaacaacaagaactgggaatgtagtaacagaaccattttcaagggttgatgatgatgtggtggtgtaactagttgatgcacaggaagatgctggaatagtaacagtaatgtgtgctggatcaatattactacagtttggacctggagtttccttgacaacaacaacgacagatgaaacaacaccgttagataatgtagatgatgaggtagtagtgtaagttgaggaaccacaatcagttgaatcggttgaagtaatggtagataatggagtacacattgcagatggggtttccttaacgacaacaacaacagaggagacaacaccattaggtaaagtagatgctgaagtaacagtgtatgtagaagaaccacaagtagttgaatcggttgaggtaatagtagataatggagaacatgaagcagctggagtttccttaacaacaacgacgacagatgaaacaacaccgttagataatgtagatgatgaggtagtagtgtaagttgaggaaccacaatcagttgaatcggttgaagtaatggtagataatggagtacacattgcagatggggtttccttaacgacaacaacaacagaggagacaacaccattaggtaaagtagatgctgaagtaacagtgtaagtagatgaaccacaaccagtagaaacagttgaggtaatagtagataatggagaacatgtagcagctggggtttcaacaacaagaactgggaatgtagtaacagaaccattttcaagagttgatgatgatgtggtggtgtaactagtagatgcacaggaagatgctggaatagtaacagtaatgtgtgctggatcaatattactacagtttggacctggagtttccttgacaacaacaacgacagatgaaacaacaccgttagataatgtggatgaagaagtagtagtgtaagttgatgaaccacaatcagttgaatcagttgaagtgatagtagataatggggaacaagatggagctggagtttcttcaaccacaagaacgtaagtggagactgaatcattaatgagagtcattgatgttgtagtagtgtaagttgatgaaccacatgttctagaattaacagatgtagaagtacttaatggagtacagtttggagttggagtttccttaacaacaacgacaactgatgaaacaacaccattggataaagttaaagctgaagtagtagtgtaggttgatgagccacatgcagtagaatcggttgaagtgatggtggataatggagaacatgaagcagctggagtttccttaacgacaacaacgacagaggagacaacaccgttggataaagtggatgatgaggtagtagtgtatgttgatgaaccacaaccagtagaatcagttgatgtaatagtggataatgaagaacatgatggagctggggtttccttaacaacaacgacaactgatgaaacaacaccgttggataaagtggatgctgaggtagtagtgtaagtagatgaaccacaaccagttgaatcagttgatgtaatggtagataatgaagaacatgatggagctggggtttccttaacaacaacgacaactgatgaaacaacaccgttggataaagtggatgctgaggtagtagtgtaagtagatgaaccacaaccagtagaaacagttgatgtaatggtggataatgaagaacatgaagcagctggagtttcaacaacaagaactgggaatgtagttaaagaaccattttcaagggttgatgatgatgtggtggtgtaactagtagatgcacagaaagttgctggaatagtaacggtaatatgtgctggatccatactttgacatgaagcagctggagtttctttgacaacaactacgaaggatgaaacaacaccattagataaggtggatgctgatgtagtagtgtaagttgaagaaccacatgtggttgagtcagttgaggtaatggtggataatggagtagttgttgaagatgttgatgcagatgttgatgcagatgttgatgcagaagtagttacaggataataacatgaatctgaaccagttgtaataatttcgacaccaattgttgtagccgcgccaccaattgtagttgttgaataacttgttgaaggtgggacattaatatcacaatcacttgtaaaaacagttgatgtagtccatgatttgattgcatcagttgcaggaacttcaacgacaatttcagatgtagtgatatgatcaccatttgcatcgaatttagttgtaagagttgtataagttgaagtaaaagttttcatccaagtttgtgtagtagttggaattggtggtgcgtaaacttgaatataagttgaagtatgaacacctaaagcatcagtaaatgtataaccaaaagttgaagttgctaaataatttttagtccaatatgaaacagattgtgaatatgatggaactaattcaacaacataagttgaagttgtccaacctaaattagtgaatgtagtacttaaacttgtatattttttatcccattgagaagcagtaactttataagatggaactaagataagttgttcataataaggagttggaccatcagtaacaagtgagtaagatgtttgttgaacgtaaacaggagcttgcattgttgaagttttagtaattgcaggaccttgaatttcaataaaagtagttggaacattattattagttgaaactgctgtaatagtttggatacctgtattagttggattaaaatcatatgaagttgaaagaactctgttatagacataaacaacatcaccagtttcaattttacctgcatcatcagtaaatacaacatctgttgaagttgcagtgtgttgataattaacattatcagttgtataaatagttttttggtttggttgattaacgacaacttcagttaaagttttttcttgaccatcaactgttgaagtcatagttgtagtataagtagatgcgtaagctgaatcccaagtaatagttgttgttggaagagcaggtaaaataatttctaaaacagatgaagtaatagttgcaccattagttgtaatagtagttaaaatagttgctgaatgagtttgagcatcattaccagtagttgtaacaacagacattgatggagcataaataataacatcagtaattgttgtccaaccttgatcaattgtagttgtaccagttgaaaatgatgatttatcccaataagtataagtagtttgtaatggaggttcttcaattaaaatgacggcagttgtaacaactgttccatcaggtaaagtatatggcatagtagttgtagcttgaccaacataattattagtccaagtagttgtaatagttggtaaaggaggaacaaaatcaataacaacaacttcagcaccagttgaaccattaccaggaacaatagatgtagtagttgaaacatatggagtagtagcagtaccagtagatgtaacagttgcagttgaagtaacagaataatcaacaccaacagtaataccaacataagttttaacactattattttcatcagtaacatataaaggttgagtaacagttgtacctggaactaaatcagttacatagaaagtagttgaactccaagaagcagtagttgaaacataagaacattgaccacctttaatatcaccacttaattgataaacataactatcagcctttgcaccacttggatcttcaatatcaaaatttaatgaagcatcagaaattgcattaatataaacaattctaattgggtacatattaccaccttctaaataaacataagattgttgagaagctgaagctgcattccaagctttacttgcaaacatgattgcttgatttgcttgacctaattgacctaattgtggattacaacaatcgaaaccaccagtacccatccaaaccatagcagcttcatcgactttgttcatagtgaatgtgtaaatacctgttgtttcagctataatgaaaaaaaaagaagaagtaataaaatgttagtataatgttttaatgataggagacaaattttaagaatgatgaatacgtaccataaaaataaccagttaattcaagagcaaaatttgtaattggaatttctgcaccaaataattcaccagatgcagttgttgcataaccatcatttgcaatgaaattagcagaaggaacatttgcaacagttgtaattaaaccaggttttgtataagcaccattataataattagtatcagtataagttaaatcactataagtataagaataaaatttagcagaataaccattaacagattgaataccagaaatggaacaaccttgattagcagaagataatctaccttggaaatcagctaaaactgatgatgaccaagataatgctaatgaagctaatgaaaaagttgaaaaacgcataatatatttgttttcaaacttgtattagactaatttgctgatagtaaaagaaagaaagataatagattaaaataaaaaataaattagaattgaatagataaggcaaaaagatgttgtggaagtatcaaggtatttataagaagttaaaattttccaaattatataattagaaattagaattaacaattagaattgaatagaaataaggaatagggatcaagaatagatccaattgatcatcggctcagtaaagtgaattaatttaattataattatagtatttttggatgaattcggtttaaattgaaaaggtaaaaatagattattgtgtcatataaccgattgttcaattggttaacttagtagattaatctaactggattgttacaatcaacgtaaatgtttcactgaaaaacagaaataatagtgaaattaacaaccgttgagcgacagaacataaggtttgcaaaaaatttccagatcttgaaaaatttcttttttagaaacgagattgacttccgcagatggaaatgaacggtattaaatgacgtttacgtttaatgtatttcggtattaatattatggttgtaaaacagttgtaatatataattacgagatttcaaatatatgacgttatttttgtcacattactattatagtaatattactattgttacatgaaagtgacgtgattgattcctaatactaacggtaagtaatttttccgaatttttatatacaattttacaaatctcaacttttaatagatcagatctattgcaaattcgttacagtgggaacgttaaatattaacgttcaaatgtagtattttgtgtaaattgattaatacgagaacgttggagtttccttattcgttactctaatagatattgggtagtataatatatcataataaaatttaacaaataataattattcatttaataatattatattgtaaccatacaaattattaaatatttacgagaagtttatttgaacagacttaattaccaattgattgaatttaactagtacaaaatatagtataacaacctatataaaaatgtaaatataaatttcaagggggggtaacaacgaattaaggaacaaacaacggacataattgatgagtatattaaagaaggaaaaaaaagaaggaaaaagaaggaaattaaaaagaaacgaggataattccgttggaactcggtaacttcaaaaggcgaaaaataaaaacagttcgaatatgtcaataaattcattaccggattacgtaatgtcgcgtagtattaccattaatggaacattaattgattgtatttatatttcgtatttcgtatttcagattcaaagcggagttaacaatataaaaaataataaaccctataaaccttataaaccctatttattactacattaatatactacattaatatgacgcttaaaagctgcgattattttacatttcctgaataatatcaaactatagccatttgaagtttaataataatccgattattcaaacggctcataccttttctattacttagcctctaaaatacggttaatactatacctataatttgattagaatcataagatacttacctcggtctttaagattcctcatttagttttcagtcttttgagtttctgtcaaattagttaactatactggaatagggtctagctctttcaaataccctttgaggtattaaagtgtagatcgtaataatgtctttacaatgatactaatgttaccttattaagatataataaaatataataaattgccctttcttaagacacctttttaggtttcaaacctttttgttagtaactttagtatcttctattgtttaaaaatgtttttacagagaaatgtcaccattaaatgtatttaaattttgctcttctttttgacaaaaaaatcttaaaataaagataacttttttttgaaaatcaattgacagaagatcgtgtgatattttgtagagaaaagtttgctctttcatatggtaccattaatgttcattttaaaaagtataagaaagtgtagtacttccaatcaatgctgattttaaagctccttgaaaagttataaatgtagttgattacgtaaccggatattcaaaattttatgacaccttaatttttcatgttacaaatttaataataggttctttacagtttacagagtttaaggtccaattatttattttaacgacatttgttcttattagcttgttattaaagatcaattatacagtaacataatagggttcaaaatttcccttagactgtagagaaaattgtaattactaaacccaaaacatcaatttcccctgaaatgctgacaaaagacaacaattatactcgtcacttacgaactatacttatttcttatttaattttaaccaactaggaacaatcttgttatttttctttccaatagatttttcaaatttattattactatttttatcaatttttaattgttctccttcttcttctaccaccacgccactaccaatcttttttttatcatcattatcgttatttccattcattttacttctattaatatcatcaattggtaatatactatttttaacaaacttaattccttctatactactcttattcccatcaatttcaattttaaacattaatgatactcgattaataaattttaaatctttcaattgaatactcatctcatcttccctactttcattattgaaaataaccttatacggatgtatttcacttaatgaatatttgattttattcccattatcaaatttaatcttattaactatttcctcatttaaaacatcttcaaataaaattctccttaattctcgtaattctctatttttgtcaatacttatttgaattatttcattatcaggaaatttaacccgaaatttaatttcaataaatgaattctttaattcttccttctctttagcctttttctccctcattgatctagtcattaatggttcattttcagcccttttacttaatattttttgatacccttttaattgttcaactgaaataccaccttcatcatctgattcattattaattttaaaatgtttctcagatctaattatagtcttggtaaatttcgcatcttctttttcttctcctcctttttcgccttcatcaagtaacgaactatcaatcacatcaactgacgatttgttctccgttgttagatttatatctgtattgtcattactaatatcatcatctttcattacaacatcttcatttgtgatttctttttctttttctttttctgtcttcggattaacctcctctctcattttgtccattttcttaactccatccttaatcataattctaataccataattaccttgaattaatccaatatcttttaattttttatccatttcttcatcagatacaactttcatcataatttgaacaataaattttactctactcatttcaaatttttcatcattctttaaaatctcttcaataataatattttgtaaatattcattaattgtaatattattactaattttacgtgtaataacataattctgtccattttcaatactaacatttgcacgtatattaaccaaaatattattatcattactattacatttccttatttcaacatgtgaaccttgaactaaattactaaatctaattgaattacttaaatctaatgatttaccctttaaattaactaattcataatcataattatcattgctaagatcaattttaaaatatttacatgatttaatcaatacatctcgtaataatgtattaggtgttacattgaccctgtatgatttatactcccaatcaactgatataacactcataatctttgcccttgtgatgataaaagacctggtataaattcatgttcaaaatttcatgaaccctataaagatgaaaatcatcgccattttctcattacgtaattattaacacttactatacaactcgtattatacacttttactttgctaccgtattttgggtccatgaacacattaattgatggaaatcttccctaactttcttcttatcatcatcactatcctctccattgttactctctgtgaaaattgtaactaattgtcttgcataaataattccaatgttagaatctaatattttacttgaataacttatttcaattacactttcctcatcacctttaataattgcattatttaatggttgaaaaatttcattacaatcattaattaaatcttcttcattactgtaaatatttgataataaatttaaatctttcataaaattaaaacaaatattttgatcaattaaataatgtttaccaatatttaacataatcatgaaaatatcaactgaatcaaaatttttcaattctttaattaatttatgaattttattgtctttacttataattatttcctttgttttagttttagatttagtttttgatttggtttttgatttggttttcgatttactactctcctcatcatcattatttgtagaatatttgaagaataattcccttgcttcaggtacaaatccaactccaacccattgaactaataatgtttgaatttcaactttatattcattatcatttggatttaaaatcccatttttttctaatgatttaagcattaaacaaattattttaattaatttttgtgcatttgatctattagttataaatgatgaaaattcatcatttgtatcatttaccttctcattaattatatcctctaattcatatgatgaacctcttgataaaaatataactgcatttgataaaaattcatgtaataacatcattttctcaattttagttaattctaatttaccaattctactaaaactaaatttaatatctttttcatcattattattattattacctctattaccaattaataaatcatggaaataattaattaaccattgatttaatggtaaatgagttaaaaaccaaattaaaactcttctataacctgatgccattaataattcatcaattattgaaaatgatgataatggattaaatttaatcattttaataaaattatcatcattttttaaaaaattataaataacatcactattaatatttggatcactatttttaattgcttcatcatctttattcataattaaactttcattctcatattgaacaacccatgcaatacttctaataattttttcacaaatttcattatttaatgtcttttctgtcattttctttaatgctttgattaaattatcaattggtgtaataaatatattggaatcttccattgataattttaataattcaataaactcttttgttagtaaaatattatcacctcttggtatatccctccaatcattatcatcattatcttcttcttcttcttcattaccttcattttggttataatttttagaacgaattgcaggtggtccattatttatatttctaactaattctaaatgaagtgatttaatttcatcaatatttaaactctctaaatctaattgacttaaatgtttaatcatttccatttcattaattgttgataaattatcatttcttaattcttcttctccttccaccccttcctcctcttcatcataatcactttcaaaatcttcaaatacacaattacaatcaggatgtaaatcataattaatattattatctctatcatcatcattattattatttttattaatattattccattcatcattaattacttcatcatcatcaatttcttcatcatgtctctcaatttctaaaattctattcttaccaaaatatttaataccttctttatgatgtttattataattattcacattctcattattctcattctcctcattattctcatctttattcccttcactatccatataatctaattcaatttcaaacatatatttaatatcttcatcatatctatcatcaggatcaaaattaaataataattcagttacactatctaaatctgatcctagggctaataaagctgcaatgaaaattctaatatctttattaattgaaccatttgaaaatttacgaccccatggacgcataaaattaattaatgattcatgttttaaatcatgtaatcttttattaaaatcattatttaaaattaatgaaatcattgatctaattgatgatgaacctttaattataaatctaataacttcaggataacctggaaatccattaatttcatcccttctatcaatttcaatacaaagataaattattcttgtttgatttttccaaatttgtaaaaaaaatgaaagaaatggattaagacaaatattattatttgttatttttctaaataatttttcaattattaaaaatccaattgttgaaattgtatataataacattaaatgatggaaatcacttgttatattaattaaatttgaaaaagatttatgtggtaaccatttaattaattcattttcccaatttaattcatcattctttatatttgataataaattttcattatcacaattaagtaatttcataattttttcaattataaatgcaatatcataactaatttcaaatgataaattaattgaatctttatctttcttatattcattaattataattgaaattattaaatcagaaactaaatctgcacttaaaatcatttcattatttaaacctgtatctaaaggttgtgtatatggatcacataatgttgccattaaaataaataatttataaattctttcattatttgttggataaggtcgtatttgtaaaattttaaataatgtatcatgaaatttatatggatcaaagaaattatttgataattctaaatcaatactaaattcttcatcaattatttcatcatcatccaaatcatcattatcgttcccattgtcaagactactactttcttcattttcataatattctattatacgttcattattattatctctctcttgttcctcttcctcttccttattttcattaattaatatttcttccataatttctaaaaatttttcagtttgaaaattaccatcacgtaaatcattcatacatttaattaattgattatcattcatatttgatataagttttttcaaatttcgacgtaattctaaattatcttcattatcttcagattcttcaatatttttcatatttgcaaattcattgattattgtagtagtagaattggtggtaccattatttctattattattcttactcttgttcttttgactctttgatttcttagccatgattgttgccctaatgaacaaacagtttattaataatatataatacaaacctacatgaagaaaaattaaaaattaaaaaaaaagtatttatatttaattacgtaatatacactatgaatgttctcttttccaaaatttaagtaataaatcaccatatttctctaattcttcaacttgtatcattaattggaaatctaataataataaaaattgtaattctaaatgatttaattcatctaatggtaaaccaccaacttttgcatatcttgaatttttataaaaaatatcactgaaaaattttgatgcaattgttatacctgaaataattaatctatgaatattataactatccattacaaatatttgttcatgggaattatctaattcattatcaccttccataattgaatcttcattagttttattattattatttgctcttttagcaattctatcaaaataaactaataaacttaagaaaacatcattcgtaactggacaatattttaaaattctactaagatatgcatataatgaaattgcaggtacatttctaccatgaaatgataaaacatttgcattatatttactatttaataatcctgtaccttcatcattttgtgtgaaattagtggtattattatgatgatgactgttattattatctttatgtaataaatcattagcttcaacaattttttgtaataatgcacttaacatttgtaataattcatcaactggataatcagctatatttaaatgatcactcgatgatgatgtaattggttttggttgttcaatatgtgttgtgctatggttatttacttgatgattagtatgaaaattaggattagaatgtgcaggtgcagaaacagatataaattgatgattagttgggtctgtaatattagtattattttctattataatatttgattgtgcatcttgataaagggttgaactacttgaatttgttgaaaatgctaaatcttttgataaattagttgttgcagttgcaggtgttggataaggagttgtgaaaaatgcatcatttgggttagtattaattggtataggaatttgattattattagtattattatttgatccaatacttgaacttatattattattaaaatcaataatgttattattattattattattattattatttgatggatgaagttgaggtaatttttgtgtataagaatttaaattattataaaatgaattatttccatgttgactattaattgaattatttgaagtttttcgaaataaattatcattaggtaaagattgttgattttgttgttgaagttttgatgtcaataaacttcgacgaccagcgggagttaatgatgatgacataaaagatgaagaattttgattaaataatgtattattattattattatatgatgaacttacacttgaacttaaactattgttggtggtggtggtattattgacatttatcggtatactattagaggatggaaagttattattattattgatattattattattattattattattattattattaatattattaaaattatcaaatgaaccagaacgtgaagataatgaatttctatgaaaattagataaatgagttggaggtaaagcagatggactattataagaataagaagtaaaatttgaaggtgaagtagttgatgtataagatgatgaaactgatgctgaatgatttctattaattattggatttgtaattatattattattgacattattattaatattattgttattattattaaacatattattatgaaatgaataagatgaatgtgaaggtttagttatattattattattattattattaatattattatttgtactgttattaaaagaagcagataaattattagaagaaaacctttggtcagtatggaaagacattagtatatgtcttagtctaatatactatatgattattatataattacttatatatatatatatactataactatctagctaactactataccaattcattcattcattcaatcaataagaaacaatagataatggctgtataatattaataaattaaatgatattgtattcatcgacgggacgatttgtctttataaggctcaataaggaaactgttactgttattgaacaatatgtctaaatagagtgtgtttctgttgatatgccaggtgttattgactctatcactgttaagatctttgtatttgatattggtattggtagtgggagtagtattggatttattattctttccaagtatttgtatgtctgttgttaatttcctgtagtggatatgattagggaaattaattgtttttgttattctattgccgtattttatcatctttgtatgatagaagtagagaagaaagagtaagtaagtaaataaacaaaagaagataaacaagataaacaagataaaaataaaaataaaaataaagatatttttttgacatcacgataagataagataagataagaaaagaaaagatgtttttattttataagatttataagatcttcatagaagtttgattatgactgataagatataagatatgatctattatatgtatcttactatcatcataagttactcttactatcattatcttaaagatatagtataaaggaataccctcaccagccacattgtacgccctgtttgcggctggtgaatctataatagattatgttatcatatcatgataataatgattaatattctgtccctatagatcttgcttttaaatgtattatagatccagccagttatgtcaaatgcacaaaagagattacttaaagaatttaagaaatattccaatccaaataataaattatctgaatcaataatttcacttaaaccaataaatgataataatttatttgattggattgcaataattaatccaattgaaacaatttataaaaaaggtttttataaattatcaattaaattatccaatacatatccattaacacctccaataattaaatttataacaaatgagagtcaaatagatgaacaaataacttatcaaatacctcattgtaatatagattttaaaactggtgaaatttgtttagatattttgaaaactgataattggtcaccaatttggacattagaatattcaattttagcaataatttatttacttaataatcaagaacctaatagtccattaaatattgattttgcaaatttaattaaattaaatgataaattagcaattaattcaataattaattattatataaagtagtatagacttataaatttacttatttctttgcctttgaagcagaatcttttaaaacttttttaacaattttttgttcttcaataaggaaagctctaacaactctttccttaacacaattagcacatcttgaaccaccataagctcttgaaacagttttttgagttttagaaattgatgcatatgctcttggtcttaaagttgcaacacctgataatgaacaaccacaatcaccacattttggtctagttgcttgttttttaatatgttgtgcaactaatctaccacctggagttttaacaaccttaatttgatttgacttggtgttatctgtaataatataaagaaatgagagattggtatgttagtattttgtttttttcatttgaagtattgatattagaataatagtatagtaatttatgatatgatatgatagtattcttttattcttatatggtttgtaattaacattatgttctttaatgattctaatttcaaaatttatattcttatcatatatgtctacattattattatcttgatattgatgttatttcactaatttcactaatttcattaattttcattattattcattaatattcactaatttaatattctaatattctaatataaatacaatgatcagttggactaatacatacatggatttcttcttctgaaggtaactctttgagccattttgtctatgtaatgaaggttacttttgaaaagacaaaagttaaaatctttctattaactttcaattactatgataactaaattttcaattaattttttttcatttttctcatattgaagaattattatctcgctctctatttttctctgtgactgtcttttattagtagtagagtattttactaactgtgaagagagacgcggatgattttttcttagtatataattatgtaatacatgccctgctgtttgtcacgtgcgagggtttgatttattattatctttatcttatctatagagtatattacaattaacttacaattaacatattataagtagggattataattatataacaactatacaatagctatacaatttgtaaataacagtactacgtactacgtactacgtactgtgtactccgtactatactaattttcaactgcaataacttccatttcaacatcaacacctaatggtaaatcagcaactgcaacacatgatctagcaggtttataatcattaaaatatttactataaacttcattaaattctttaaaattattcatatctttaaggaaaatattacatttaacaatattctctaattttgaatttgaatctttaataatttctaaaacatttttaataacttgatctgatttaactttaaaatcaccttcaattggtttaccttcttttgtatatggaatttgtccactaacataaatgaaaccatttgccttaattgcatgtgaataacttgcagctgcaggtggtgcatttagggaaataatttgtgttgtcttagaactcatatttctaattaatgttttactaattgaagataaagacatactatactatactatactatactaattgagagtactgttacttcattataaagacaatcatcataatataaagactactatacttaatacagcgaatttcactttataaccgcaattattcatttaaagtgtcggttgaatgatttgttatatgattggttggtttattatacatctatactatactatacttcactatttcctagtatcaataccttgaacaatttcaccagttaatggttgaattttctccatttctgcaaatatttccttttgtttctcatattcatttaaattagcttgttgtttactattaaattcacgtctctctaatctttgtctatctttaattggtccctcttgtaattgctatagtgatatttatatctatatgttagtataaatttccataaaacctaaaaatacactacttacatctttttcattctctgccatgaaataaactgcaccaattgtcgtaattgaaagtgcagtacttaatactaatgtaatctttgatgctcttgacattgttcttgtcttaagaagagtaagtgataagataagtctttactaatagaaataatgataatataggataatatacaaaaaagaccttacgtaatatcaatctttaccaatccatattggatcatcaaggaaataaagccatgaaattgatgaccatgatgatataacaccaaatgaacaataaatactataaacaattaaccaaatataatttaaatcaaaatttaattcaaaattaaaaatattaattaattgaattataatacataatggtgcaaataataacatataaattaaatttaatctatctaaaacaattacccttgtattaatattaattattcttgaaaaatgtgtaacttcactaaaacttgtttggaaaacaataaaccaaacaaatgttattaaacttttaaacatccattcatttgatccttttaaaattgggaataatgaaatatatcctgatgatgttaataattgaaatgatggtaataatcttctatcttgacaaattacaaatgttaatggtattataatcatcattataaatttttcctctatatgccatccgaaaaggtaatatgaatatccacataatgatatactaccaactaatctttcaaaatttggttgaaaaattattggaattattgacattatttgataaaaaattataagtaaaaatgtatgtctattttcaatatttggtaatattttaaattgcttatttggagaataattatattcaatggagaataatttatttaaaattggtaatttttcatttaataaaattaataatttatcagtaaatgaatataatgcccatacatttggtgcccaataattattggttatctctaattgtgaattatcaaataatctattgaaaatatcatttataactccataatatataaatggtataaatgcaattgttaaaactaataaaatagttattgataattttattaaatttatccaattaataatatttattatatctttcaatttataatcccaataacttttttttttaattattggatttaaacaatatgatgaaattaaaaatgttaaataagcaggtgaaataaatataaaatttgatttaaaacatattaatatggtaaaccaaaatgaacattttaaataattacctaattttgcattaactaatgataaaattaaaataccgaataaaaatccattaaattggaaatttatatgatcaattatgaataatccaggtgataaaacaattgatgcagaaattacaaaatttcttctcttttctttattactcttggaaatatcaataaaccattgtaatgccaaaaataacaatatttcagatattataactgtacttctttgaaatataattattttcatactattatcattattatctgatatgatgaaatattgagaaatttttgataaaatccattggaaatatgcaaaaaatggtgaacatttcaatgggtatggtgataatgtttcattataccaatcttttaatggaattaaatttgtaattgaaatccaatttctataaacattgaaatcatgtgaaggtaatgttgggaataataatattttaagtaatgttgaagctacccagatattccaaagtgaataattatatccatttctatgtattgaaccagtttcactgtcattagtggtcattaaccttgttattcttaaaagaaaagacaacatataagaataagaatacttcccaaataggcaagaacggtaatttccatttaaaaattcatcaccttattctattaactttaacccagtattatatattacagtacctctttatcttcttttcagtatctaaaagagagatagaattgataagtaaagtagtagtgtgctcttagactggtcttatatatattatatattgttatatactatatactatcctatattcatttaatttctaattgttatcttttcggagataatttccaatcacaattttcagggaaatacatacttatcttataattgatacccttagagttacataaattaaatacatcgttatgccatatactccagttacaagagttaaacgctctcaatcaaatgataataatattaatataattccaaatgataatgatttaattaattcggactctatatctccttatcaatcaaataatgaattatcatcaattggtagacaactgtcagatttaaatattgattatcaaaataataatcaattgaataattcaattgataatgatgatgataatgatgatgatgatgataatgagagtaaaaattgtttaactaaaaatactaatctaacattgggaaaggataataacaatacaaagattggatataataaatttaattcaatttcagatgatgatagtttaccattatcactttcatttttgaaaaaaccttcaaggagttcaagtatggattcaggtattgatattcaaaaaataattaaacaaaatactctgataaattctaaaaaatttgataattataattataatatttcaaatattgatacaactattgaatctcctgaatctcctgtttctccattagtttcaatttccaatataaatcttgatacatcaaataatatcgataatgaaaataattatcattatccattagttaggaaaaaatcaggtgaattggttaaatcttcattaaaattaaatagttcatttaaatcatcaggtgctgtatcaatgccaacaactccaacttataaacaagttcattttggtaataatattaatgttaaatattttaaggaaaaggataaaccaaattcaattagtgccgataattctccatttaattcagaaactgaacaactgcacgatgaggatgatgatgattattatagtgatgaaaatatcaaattaagatcggatagtgatgatgagtatgatgatgatgatgatgatgatgatgatgatacaattagatctaataatattaattattttggatttactaataatgttgtcttagattcaaattattatcatgataaattatttaaatcatgtaaaaaatatattgaaagtgaaaatccaaggaaattagaaaaatttaaaaatgcaattaaaaattggaatttagatttatctgattttcaaacaatttcttatcgtgataaaattgattgtgaagtacctgttttccttgaaagagttttcttaaatttagataaaactttaattattggacaaatagctgttaaaaatttaagttttacaaaatctgttaaaattagatatactgttgataattggaaaactattattaatgtaattgcaaaatatacttcagatataccaagagtactgaaaaaggcaggttatgatcgttttattttccaattatcaactccaattttattaacatcatattttaaatcaaatcctacaagttttaatattaatccaataattaatttttgtgttaaattttcatgtaatggtcaagattattgggataataataataggaaaaattatacattaaaatttttcaatacaaaaatgctaaataatgataataataataataataataataccgaacaatatctaagttcaccaactccatcaaaatcaaaagaaaatttgattataaataaggataaaaatcaaactaagaaaggagataattcttatttccctaaatcaatcaacaattctaatgttaaaattaaaagatcaagaagttttgatatgcgtaataatattaaagcaatgatatcatcacctaaatttttaattaaggataataatggtgataagaatccaacatctataagtttaacggatactaaagataatataccaagtttaaatataaatatacccgatgataagaataatcaatattatcaagaatatgatactattagtggtaatagtacattacaagataataaaattaataaaattaatgaaaataataatattaatgaaaataataataataatgggaaacaaaatttaagggaagttttcattaattcaaaggatagtacacctaaaggtattgataataatcaattaagtggtaatggggataatagtattgaatctgaaagttataaagatttattagagaaatattgtttctttaagggttcaaatccagtttcatcatttttaacagatgttaaagatccaactgatggttcaagtgtttatactgaaaaattctattagctacaaatttaattaaataatatttagtaaaaaattatatacctatacgtaaaaagtgatagatataagtgtaagtgtaagagtttgaataaattataattttctcttctttattgcaggtttgtcctcttcttcatcttcatcttcttcttcatcttcatttccacttatagcatcaacaaattcttcttcatcatcttcatcattatcaatttcatcattttcatcatcagaatttacttgatcatatctactttttaaacctttcatctttctagtttgtaatctacttaaatcttgagtaccaacatgaattttagcaacttgatcaccaagtgaatcagtttgaatatttttcctttcctttgattgtaattgttttggaattttcaatgcttctttctccatttcaggatcaacatgatgaattctacctattttaaaatttaatcttggaccagtttcttcaagttcaattctagctaattttggttcatttgattttaaagttttcaatttatatattctaaaataaattaatggtaatttagatattaaaacatcattatcatcttcttcaattgcagaaattgatataacatattgtaaacctgcaacatcttgtaaattagattgttcaccatgaaacatatctaaaaataatgatttaatttgaataaaagttggattaatatcgaaaatatgaccttgaaatgtaaataaaggttttaaaccaacttggaaagtcatttttttaaaatcttgaaataatttaaaatcatttaaaacttgtaattcaatcatatcataaattttataatcaaaagttctaataaatgttaaattatttggtcttttcttattatttgttgataaaattaataatgatgcatcatttttttcacttaaaaattctaaacttgttgtatcttcaaatggtaatatattatttttctttgtaaaacgtttaataaaaggtttctttaatgaacttaaatcaattgttatatcatgtaatgctttatttgaattattacctggaatgaaaagtgcagttttagtattttcaacaattttactctctttcttttcaactgctctcttggaacgagcggtcttaggtttagttgatctaatcatattggtaattggtctattgttactaagaaatgaagtattaaagtaaagtaaagtaaatttaaaaaataaaaaaatttcatgaaaatgaaaatgaaaaaaaaaaatttttgtgggaaaaaataagttacgtaacatgtttattaatgttgatgttaatgttaatgttaatataccatttttacttatttgttgactggtttagtggtagaatagcttctttagtgggtagaaaagtaggggagaatggataacatcacgttcactgctactaggtttggtaatggtattcaaacaccatcttccaatgattcagttaaggatattaatgttaatgttaatgacaatgtcaatgttgatattgatatagacaatgataattcacaatgtcaaactgtactaaataactctcattatagtcttagttctgtcaaaattaatgcattacctaaattaattgaaaatgaaaaaatattatccttaaaaattgccactgattcaattgcaattttaatttcaaatttaagaattttagtatttgatttccaaaatagtacaattaataatgaaaataatatctatgcatttgaatatgattataaaattaatcaatatggtttattacccttgtgtactattattccaaatcctttaaaacctttaaaacctgatttaattataattgatccattatcaggtaatttacaatattttgaatcaattaaattatcaccttcattaagtatcttacaaaataaattaattgataaaattcaaatttacaatgcagaatttttaactgaaattaaatttttcgataatgatagtttcatcattttaacatctcaaaagagaattattcatgtttcagttaaggataaatttggtgatttatcaattaattcaaatcaaatttataataatagaccaattataagttcaattttatctaaatcttatagtattagagaatatgaaaattcaaatcgtatcatttcaatgaaaatttttaatgtatcaccagttttgaaaattttattagttttagaatctaatggtaaaattactttcttaaatcatttaaagggtagttcaacttttacaattaataattcatttgatttagattcaattgattctaatggggatcaattgaattttattgattgtgaactttcattattaaacaattatctcgatgtattaatattcaatattgatgaaaaatcttttaaaaattatagatatcaattagacattaattcaaataataattcaataaatttacttcatagaaatcatattccatctattcttgataatgccagtaatgaacttaatactacttactttcaatcaaaattattttcaattgataaattagatgcattagttattaagaatgataataaaatcatcttaacacgtaagaatcttgaagttagaaattgttggtatgaagttattttattaaatgatgatttaaatgttttctcatttgttcaagataattttaatgaaagtttattttatctatcttgcaataagggagttttcacattgaaaataaatacagttggtgataacttggataatgttttctatttaaaaaatcatataaaccaattcttacaattttcaaattctactaatgccttagttgattataatttaaagaaaactgataattcattctctgaatcagaaattaaaattgcattaaatgatatattagatgatctcttagaaaataaatctaaatttataattacttcacaaatcttcattgaacaaaatttacaaaatagatttcaatgtattaaaaatttattgaattatgcctcattaaactacaatatttcaaatgataatgaaatgagtactaaacttttaaatgcatgtgaacttatctcattaagtgctaaattctatgaattaattgcaaataatagtcttgaaaatgaattgaaatcaatcttaaaggaaatgcactattcatcctcatttgaaactttcttacaagataaaacaaaggaaatagtaatcctaattgcaaattattgttctcatgttcttaaaaatggaagtaatgaacaaataattgaactttcttcaataatgagatatcttcttatagatgcatttgtcaaaattgatgatgaaataaaaaatagtattggttccgataaattttccactattttcattgatcatttccaatttataattgatattaattccgttacacaaaatatttattctttacaagatggtttatctgaaattgaaattactgataaatataatgaaattttattaggtttatcatgtttcctatattacacaactaatgaaattgttgaattttctaaaattaacaaaaatgattcaactcgttcatctgaattattattgaaaaataaagataaatggattttcattttcatcatacttaataaacaatcagatataattccattagtaacaaaatataatgaccttcaaagtttatcatcattattagaaagtaagagagaaatggttcaaaatttatatgagcaaaatgaatttactgatattgaatatgcaaattatattactgatgttgataatgaatttgataattatatgaatatttatcaatataaatttgcagaatctcttttcaaatattatattcaaaatgataagattaatatcatgatgacttgttttgatagatattctgaataccttgaaaaatttttatcaactgatattaattataataaatttggttggatttatgatataaagataagacaattctctaccgcttctacaaaattagctaattatttaaataacagtgtggatgaaaatattgttgatagaaatttacaagcaagtattggtaaattatctaatcttgttgcatttggtaataatgagaattttaaacagttcaacaatattttaactttaaattcaatacaaagttcaattttcaacactttattaaatttaggattttcttctactaatggaaatgaacatttcctatgggaatcagattatatgatgaataataatttatcttatttcatagaagatgtgaaaagaatatggaataatattattgttaataagtcagtatctttaacagatttgattaatttcatttctttgtcatcttttgaaataaaaaatgtggactttacaagtaattcaaatgatgaagataagaaaattaaaaatgaagaaactaaacaacgtccaaattctgccattgtagaatttacatcaaaaatatacattgatttaattgagttaattaacacattcgaaagttttgaaaatggaaataatgatataattatttcaaattctaatgatgaaattaattataagaaaaagagagtttggatgaaacttttatttagaagattggcattaagggatgatttaaaggaagttgctaaaaaagttatcctatacatggaagaacaaaatacaaaattcagtttaacaggatcggaactgttaatatcaaatgatgaattattgtctttaaatattaaagatgaaaatatattaaaagaactcaaaaatgaaaatgatcttattaactcttcaaaaagttttcttttttaaaaaaattgtgtaatttataatatagaataattaaaactatcgattaatataacaactagtcaacattgttcaataattgtagtaattgaaagcaagaaaacaagttaataaaaaaaactccgagacggggaattgaaccccggtctcccgcgtgacaagcggaaattctagccactaaactatctcggataaaacaaacctgcgcaagccaggaatcgaaccaggggctcaacgatggcaacgttgaattttaccactaaaccacttgcgcttgttatgtttctgcctagctgcttgtaatccttgttttatattttatgattacgtaatctgtgaagtacgattagtagtcttgcgatttgtacaattgtttaggctaattgatataccaagcccaattaagcccaaactatttacattttgcattcaatacatctttactgtaccatgaaatttccatcgactgtcttgtgtgatgttgtaaacgatgaattggacacaaagctggtacctatggtaccaaataattggaaaataaacaaaatcaacaacatagatatcaaattattctccaggattcattttttgatttttatcatttgaaacattgttaaatttaattgctggtttcttattttgtcttgagcggtagcagatatgccaaacgtcctaatttaattaatgggaagaagaattaactgagcttcgatacattcatctatatcatgtaaacctttaatttcaggagcaccattagaacaaacaaaatccaccttttcaccattaaaatgatgcattatcatttctaatgttttaggatatcattgaatagattaaattgttcacttagttgaaataatttaaaggtgcttctagatctccaactttctttctttccgtttcgatggtacaaatagctcttattgttactgctcttacccatacctatgacacaccctacaaaatactaactataaaaggtattcacttggctttcgaatacaagtaattttttcatattgtttagatattcttctcttttgctaatattcaaacataattaatattcacgattcattaaagttctagttctgaaattaagtttagaataaaagctttgatatttagtttaaatttcaacttatttctgaactacttgacaattttcaaaggcattctgtaagtaatcttacaatattaatgtttcattctattgcctctatcttaaaaatggatacttgggattcttcatatgtactaaacctgattccagaaaatcaacctgttaatggcttgaatgtacgtggattagcactaaacaaagcctgtatatatcttggcgataatcctcttttttgctagattcaaatgaaaataagattgattccattaaatatactagattatacctatatctaaccactcaacttttgaaataaatattagctttcaaccaaagattatcgtttgaacaaaaataataatctaataaaaaaattatttgaaggaagcgaggttcgaactcgcgcggacaatcgcccaacagatcttaagtctgccgccttagaccactcggccatccctccaattgttgtttaattaaaccttttgttcaaaatactcatgcttgtatgattacgtaataaaaatgtatgagacattagtcactgagtatacagtaaaaaaagggacatatggtcaaagaatatatgcgtataactaatcttttgagatcggtaattctaagcgaaactcaacaatacataataatattgtattattaagttgagccttaaaaactggttagagttaagtattgttcgcaaatcagaaaaaagaaacgttataaatcataaaaagaaacgttacaaattagaaaaagaaacgatagtaaagattggaattcttagtaaaaatacaacgaagaattccaaggtttagtaacgttccttttaaaaagttctttagttagttttgtatttaatttttttatttaaattttatttagttcctttaaataacttttactgttgtcatagaatagaccctgcatctagagttattagattacaacataatcaatctgtataaaattgtattttttaatgaaattaatgtaaaaaaaatagaagaataaattttgttctcatagcaaaaaggctagatttttgaaaggtgaaaatggagttatcacgtttttttcaattgtaaaggaattaaaagaattttaaataagttagtaatagaaattgatccaaagaatattgtttgttcagtattccgaaaggaaaaagcttatgtggcaagtacaataatcaaaattttatgtttttcaacaagcaatgctacaaaagcaagaagaataactctgcattttattaatttggccattattgtaatagagacaatatatggtgttaaaaattctttatcattagtaattaagaaaaaattaaaggtacttttttcaagtttcaattacttttgtgtcaaaattgaaggtcaaatggcttttgaataattttttggttgatccaatataatcagcaatcatcaaaaatgtcaattacaatgtatacttttcgatagattctcagttttatcacatctgccaactttggaaagtagaagatgaacataacatgtcttttttgattgtaaagatattctaagacatttttaacatggatattaatacaaaaactctaattgattttgcagattcaaaagagaaagcatatacggcagtcaatttaataatcaaactagttatactttttaacaaacaatgcttcaaatataagaaacttgatttaaaattcagaataaaacctaggataaataaagaggtacatttttattcgaatacaaaaagtagaatctaaactgatcaaaagactacaaaaaactatgattttgaaaatttacattaaactcttctgtattgaaaaaaatcttttatttggccaagctgtatagatttgtataaaatttaatgtaaaaaacttatacaattcaggggcttttgcaaatcgttattttaacatatacacaatttcgaatacatatgattttaaataaatgtttatcaataaattgttttagcaattcaagaaaaaagagagccaatgtgtactaatatatatatatatatatatatatatattatatgtcatttttattattaatgtcactatttttattctctacagattcaataatctataaaaacttttaattgtaaatcatatctgaccattccatatgcgtaggtacatctaatgttttcgttaacatataggcaatattttcatctgaataaatatgattcaatttggccgccttttcctgatccaaataacttataacaaaatggtatttgacatcaatgtcctttactcttttattttgtgaatcaggtccatacaatgcacgagcagattggtgttcacagaccatattgataaatgaaacactcaatgatagttcctttaaaacatccctataaacaagagcatcagttaacccctcagacaaaactatatattcacattcactacttgatcctctatgtctttgtcttttagactgccaattgattatatttccatttattaaaatcatatgaccaaattgtgatttcttatcactaatatctccgacccaatttgaacttgtgagacaaaccaaatcaattttaccttctttaggataaggtcttacaaacacatcgcctctctcatcaacaaacctgaattcgtcgtagttaatttccacaggtatgttattatgataatgtaatccgaagaatctagtttgaacaacatactgaaaaagtcttttagcacctttcattctatatgtagttggattttccaaaaaccttgacaaataagaaacagcaaatgcaatatctactcttacactattggccaaaaatagtaactttccaataagtgatctatatactgaatgctcttttttatttaatggtggagaattatcttcctttttctcaaaaccttttgccaatggagtatccaaccttcttccactaaaagaaaaatcaaattcttttaccattctatcaatttgatcttcagatgttaaaattataccattatcagttttcctgatattaattcctaggaaattgtttgggtatcctataatcttcatttcgaagtcttttcctaacagctgtagagtttctttaattgatttattttttccgcaaattaaaaactcgtctacgtataatatcaacatcactccttttctccaaaataaacatggttccacagctgaatttttgaatccattattctttaaaaaatctctaactgtgaaataccatcctcttgctgattgtttcaaaccatacacagttctatttagtttccaaactatattactatctccggttgttgcatctggtggttccaaataaatatcatattgtgatttagcatttaaaaatgcatctgtagcctctacttgtaaaatatcccaattcatcatggcagacaagctaagaaccaaccttacagtttcatatgttgcagtcggtgctgatgtctctccataattaatacctttcctttgtgtgaatccctttgccattattcttgccttgaatacatcttctcctgtctcagaatctaactctacactgaacaaccatttacttttaacaattttttttcttggaacttttgatttattaactaatgtataaacatgtttcctgttcattaaattaagttcctctaatacggcctccctccattcttcctcctgtggtgttctaagggcctcttcgtatgtttttggaatatgatacttatctgtaatttgaaccattggactttactttgttcaatcaaccgttattgagaaaactgtatacagtctttttaatcaaatgagactaactagtaatatgtaaaaatcgaatgtatcttagttaagtccgttgtaacttcattttcaactacccgtaaaaattttgaatccccagtatttttattaagcgcgggggaagtttactgggaactaaagaatcatcgccggtggctataaataaagttacagcggactaaaccaacatacatttggttactgaattttactagttagtctcattcatctaaagagactgtatatatagaaaatggccaaaaaaattattttatggtaaattttacatgaatctctaaaatttctcttattattattatttgaaacagaaaaaaaataagaaagataaaaaactccgagacggggaattgaaccccggtctcccgcgtgacaagcggaaattctagccactaaactatctcggatataaaacaaacctgcgcaagccaggaatcgaaccaggggctcaacgatggcaacgttgaattttaccactaaaccacttgcgcttgttatgtttttgtaaatgaacgacttcgcccgctcccctctttcctaattcatggagcctgaccgagtagtgtagtgggagaccatatgcgaaactcaggtgctgcaatcaaacttgaagaaatgcttgttgagatacaaatgtttcattgttactataaatagatgtgtttcatctaggtttcatctatttatagaaaagactagaccatatgatattagtaatacttatgattactaatgcctcatatgatgacaaatacaaacatgaaacatttgattattaatcaaaacaccaattatcttagacataaatttgtctatataaagagaagtttccacttactctttattgttctttaacttacttattgtttttctttattataacttatatattattatttctttttataaccttaaagtaactaactatggatatctatactagagccgttaccgttcaacaggttatgagccactttgctctagcttgtccaaaggacgaatcctctaagttggtttctgctgttaactatccaatgtgggataatatgacgaaaatgacattggcagcccaaggtgttggtatggatacatactttgaatctggtgatatgttgatcccagatggtgatacttcagatgatgttaatatcttgaagttacaatcagctttggaaaatggtatccaaactgttttgatgaatactgtttcaagaaagattttgagaaaatatcaaggttctaatctttttggttataatttgttgtgtgcaatccgtcgtgattatgctaaagtctctccgagacaattgtttgatatggttaagaaagctgctgatgctgctttgaacaaatccgcttctgatgaaactgcggtttctcttttaagagatatttgtgcttaagctcctactgttcaagagcttactggtttattttatttaatgatgttcaagtctgatcaggcttgttcaaggattctggatgctccagatcctgatgttaatttgtctgttgttgaaaacaagttacgtgatatggtatcttcggtttcaactagttatgctgcaagtggttccaaaaccacttcatccaatgttggttcttcttcttcaattatgtgctacagatgtaataagaaaggacatactgcaagaaattgtttagctccagctcctgcttcaagaaacaagtcaaatacttcagattcaaaaccaaaatctgaatctaataataacagtggagttggttggtcagtctacaatacaactgatgttacagaagtagctagagaaagctatgttttagattcaggatccactttgcatatttcaaaggatattcgccattttgttcatttccgtgaatccactggtaccatcactggaattgctaacacccatttaaatgttacaggtgttggtactgtcgagtttatcgatcctgaaacatcattcaagattactttgaatgatgtttgttatgttcctgatgccatgcaaaatttaatttctattaagaaggcttcatcaacaggtgcttttactttttactccaatcatgcaatgtttaccaattctgctgacaatatttcaagaaaaattgctacattgaaagatccttatctgtatgttttggattttccacctagggttacaaggtatgaaaacgcaactgtgtttctcgctagaccaccccttagaactttgaatgcacataatgcactgggtcatccatctcctcaaacaatgttacaactgggattttctgatgctccaaatatgattgaatgttcatcttgtgcagctggtaagtcaaccaggacctttccaaaagctggttattctcctaaatcaactgttcctttgcaacttctccatgcagatttatgtggtccaatttcggttgccggtattggtcttgaaaaatatttttaactattgttgatgacttttctagatggactcagattgttccattagaagtaaaatcagattgcaacaacgctgttatgaattttattaaaacagctgaaaatcattttagtggtaaaggatacaaggtatctaaaatcagaaccgataatggtactgagttttgcaacaaaattatggatgaattttattatgaaaaaggtattttccatcagaaaactgttccttacaattcctctcaaaacggtgttgcagaaaggaaacatagaaccattcaagagaaaacaagaacattaattgcatcagccggtgctcccattaagttttggtcagaagcagttaagactgctgaatttgttatcaatcgtcttccatctccttatttgaaaaataaatctccttttgaattatggaacgattattctccagattattcaatttttcatccctttggtgttcaatgtcgtgttttggttcctaaaaccaaaagaaattcaatttttgatgcttcaacagttgatgctatttttgtaggttacagtcctgatcataaggcatacagatgttacgtcccggacttacaagacattgttatttcaaataatgtcaaatttcaagatgattactttccataccttaagaaaagagatatggacaaggttgaggatcaaacaaaaattccgtccgatatttatgccggtgcagctgctggtggggcttatcttccattagatattaccaactcatctggaaattactcaggtgaacctaccttccttagatttgagtccaccaatgttttaccttccacacctcctgaatttgactctatattatctgagactcaaaatgaagatgcaaatattgatacaactgttgctattgaggaagttataaactctattgatgctgatgaagaagttatcggttctgccgatgaaaatgaaaatgttaacttagatgttggtagtcatagaccacttaatcaatccccacaagatgaagataatggtccacaacttgcaggtatggaaatgctagatgaatatgattctgctgaagactgaagattatgtaccaaatgaaactgctagtgatatttcatctgttactggaagatctgaaacgcaaactgaaactacgaactgtacttgctggtacagaacttgatgattactttgattatatgaatgaacatgatttgtttcataatgttcatgccccaatgatgccatatatgctggaacagggtgatttgctggatgatattcagatggttgaatcaaattttgaaattatgagatccaataatattcctcaatgaagactcggaggttatcaatatccttcccgatgcttctagtactgaaacatcattaacaagaacgatttcagaagttactgactacagatggtccgtgatgctaaaagacaacacactgggtccttcattccatgtattaaatgctgtacataaagtcatcaatgactcttcaacatctgactacattccttcttctctgccggaagctttaagtggccctgattctaaattttggtcggatgctattgagaaagagcttcaagctcatgttgataataatacttgggaattatgtactctaccagcacatcgtagagctattggttgcagatgggtgtttaccattaaagattcaacaacaccacctacatataaagcacgtcttgtagcacaaggctttagacaaattcaaggattgattatggtgaaacttttagtctagttgtaagatatgaaagtattagagttttatttgcccttgcggcacaatttaaattaaaaatccatcaaatggatgttacaactgcatttttaaatggggatcttgaagaagaaatttatatggttatccccccaggtgttcaaactgctgtcgacaaagtgtgtcgtttgaagaaaagtctttatggacttaagcaatctcctttatgttggaatattaaaattaattcggttcttttaaattatggttttaacagagctgtttctgaatttggtgtctattctaaggtttcctcaggtgttattattttggttgccctctatgttgatgatttgctgattttgtcaaatgataatgcttcaattaaagatgttaaacaagaattatcatcaaagtttaaaatgaaggatttgggaagagtttctacatttttgggtatggagatcatgcaagatgatgaaaaagtgtgcatgcatctcaacaggtatttattaaatttcttggcttgattttggtatgacagaatgtaattctgtgactgttcctattgcacctggtacttctttaattcccgaaggtaaatgtgttcatgaaaaagaggcctctcggtatcgcaccatggtggggaaactattatttgctgctaacaccgtaagacctgacttagcttatgctgcatcctctttatcaagatttattaaaaatcctcatccaaatcatataaatgctgctaaacatgtattaagatacattaaaggaactttgaatttaggattagaatttaaatattcaaataatttcaaattgacttgggtactgtgactcagattgggcaagtgataaagttgacagaaaatctataactggttacaattttaaattgggtaacactgttatcacatggaaatccacaaaacagcaaactgttgctttgtcttcaacggaagccgaagtacatggcattgggtgacgctattaaggaattgctttggttaaaacaattgattgaagcacattggtttgaaaatctatgaaacaccaattatttttgaagacaatgaaggttgcaagatgttatcatcacatcctgtacatcatcaacggaccaagcatattgacattagacaccattttattagggatcatattaaaaataatgattgtgaaattcattctattaacattgaaaacatgattgctgatatgtttactaaaggtttatctaaaatcaaatttcaaagatttgtgaaattaactggtatgaacctaattgatgtttagcttatggtggggtgttgagatacaaatgtttcattgttactataaatagatgtgtttcatctaggtttcatctatttatagaaaagactagaccatatgatattaggtaatacttatgattactaatgcctcatagtgatgacaaatacaaacatgaaacatttgattattaatcaaaacaccaattatcttagacataaatttgtctatataaagagaagtttccacttactctttacttgttctttaacttacttattgtttttctttattataacttatatattattatttctttttataaccttaaagtaactactatggatatctatactagagccgttaccgttcaacaatgctctccaacaaaacagagtaccctaatgtcctaaagtatgacacaacattcaagattacatccaactccagaaacctcacggaaaaatcaatcagcacttttttaaaccaaatttttgatgaattaaataaagacaaagatctttctgatattgcatcagattgtgaaacttgctttgaggatatcaagactaagttcactttcctccacctactcctaccatcactagcactatgtgatgacttattatatcaaaaactcatggctacatttcaccaagtcgctgaaaagtcagacaaaatttatatctcttctccaccagaaaatacattggaaaacgctgtcattttaaaaatgagctatccttcttatgttagagactctcttgcagaacctctagcacaacaactttactcaaactttggaaatattatccacatttccaaaccgcctaaaaggccaataaacatagcatttaaaacctccacaattaaatccgcatatgtcctcattgatttaaaacaccactcagtccctccaaccacttgtgaagtcacactagatgacgaacaatataacatcagtaccaccgtcaattcccccctacgtttctgctcttactgcaaggttctcggtcaccacaaaaaacaatgtccaattagaaaaaaagaatgttctcattgtcaccaagaacacaaactaatcagctgtcctacagcttcacaagaaatcatcaaacaaggacttagtctacttcctgaacaatacgtaagggatgccttcaaaaacgctaaaatagctgaatctactccacaatggatcgaaatttataacaatttcttccctgctacccttcaagaatttttccaaacagcattagaacaactcaaagcagatgaaatcattggaaacactccaaacactatcgataacgatagccaacaaccaatcggcactcaaatcaataattataacgaacaatcatttgacaatcaaaatgctaattataatcaaccatcactaaacactcaaaataatgcttataattcacaatcgataaacgaccaaactgaggacgaatcaatggatcccgaagcttacaaatatgttcaacaaccatctgacaaacgccttaaggcatcactggttgatgaacactcacctccaaaacaattttaactaccctggtaaaaaccaatatatatctatctatcatgatagatcgttctttttcttacttcataaaaaatttcaaatcagatttcattttcaattcaactccaaagttcttttcttacatattaaaaaatcaaaaattaaataataaatggttaaattaatattatttaacatacaaaaacttaaatcaatatccaagtcggccacctttctaaatcaaatcaacaccatcaaccccgacataatagcactcactgaatatgacatcacaacagaatccaccactaaagagcaaattctaaaaatgtttgaaaataaaaatttcagaccagtaaataccattgaagaatccagagtgcaaatatttgtcaatcacacaacatataatcaaataattgatacttccatcatacaaaaatcattccaacgccctcacaatcgatacataaccgatctcaaactgacctttgatgatactgaaatacatatctgccttgcatatgcgcccgcttcatcacacaccagcaacttttctaatctcaccacaataaccaaagaagatttctattaccacttcaacaccaacatcaagtcaatcaacctcaccaatccaatcttccttggagattggaacactcctccaaaccacacattcaaccataccatgggagaccttgactgcattgacgcaacatcaaggactccaacaaaataccaatacctccccaccaacttttccacaggcgaaaatagaagacttgatcgtttttacattcatgaaaacctactccatcaccactccatcaaatacaaactacttcaaaaacaaccatactcaacccatcttcccataatgcttaccatcagaccaaaatctcgaaggaaaaagcattcttcaaatcaacactctccttcattcccaacatcgctatattcaaatagaaaatctccattcccacatcaccttaccaaacaccctgatttaatcaagttcatattccagcctacaccaatatgggaagataaccttattctcagcatggaccactacatcagatgtatacaacaccgcctttcgaaagtcaaaagactctctagacttcttccatcagagcaccaatcaacccgagaaaatctgtactcaaatttgaaagcatcacacaactctaatccattatgcatcacctaccaacaacttaacaaacgattcaaaaatttcttaaatgaaacaaccttttccaaacttacaatggaaaagtcacacaaactttttgattctctattcaacaacaactccattacctccctcacagatacagaaattctcttcaactccattttctccaacttcatagccccacagctattagattcagaaatacaaaatcttaatgccaaatttgaagaaacagaaatctttaacaaccttaaagcactacatcaaaaaggcccttcatcacctggaccagacggcatcacatatgctgcctggttccacagctgggaatattcaaaacttcatatcattcagttcattaatcaaatacacttctcaaccagccaagcatctcaaaccgtcaactctcaatcatcaatctttaactcaattatcaaactaataccaaaaaagaattttgatcctaaagaacccaatcccgggaacctcaggccaatctctttaacaaataccatctttagattatacaactatacattgaccagaagatcaatgaacatcttcaacagattaatatcaccacatcaacaagctttcttaccaaaccgggatatccacctccacatacaaacagcaaagatcatagcaaactatatcaatgctgccccaccatcacacgcctctctcttactagttgatatcaaaaaagcatttgactccattagccacaacttcatcaccaccatccttaagaaattcaattttccatcaacgttcattaaagcaataatgtttcaatctcgagcaggtttcacccaacttctcaatggtaaattcatatatcgacccaaaatcgatatatccaatggaactcgacaaggactaccattatcacccctcatcttcaatctttgcttggaacccttattaaacaaaataaactccaccatcaacggtatcatctataaccctctaaccacattcaccccatcaaccactctcagcaatttcacaaaaaaagtaaaaagtcaggcttttgctgatgatattatcactttcaaccaagactccatcgacatcaacaaaaccatccaaattttctctgaatttgaaaacataagtggtctaaaactcaatcaccaaaaaacaaaactatattgcaacccatcatcaattcaacacatcaaatcaacaatcacagatgatattgaggtgacttccatcaccgaaaatccgacctacctaggagtaccattgatgaaaaccaactggtataaaaagctggatttactaacctctcgattaagaagaatttgcttcatggaccttccacttcacctaattatacttgggattaacacttacatcttctccaccctttacttcttagatcaacatgatcctacacctgcacccaccttacaatcatttatcaacaatgttaaatcaatagtcagaaatcaaatatggccaaaaatccctacaaacaaagactattggtacatcccaagaaaacaaggaggattcggaatgatggatcttgaaacccaactacagggaagaagagcatttttcatactatacatgctcgatccttcccagtcgggtgcaaagcatccatacctaccccaacttctccgaatcaatcttcaatcaaatctgttatattctcaatacattaacaataccattaacaccattcaaactcaagttaatgaagcaatacaactaaatcaacaacatccaaccactatccaaacctcacatcacttcacccaatatcttcaacatcttcaacattttacaccatggtacttactaaccacaaattataacaaccagttaaaacatccatcaacatcacatatctccatccacccatcaaaaataaccgtcagatactcggaaatgttcagagagcaacacagacaacaacattttgatgaacgaaatcaacaagaagcctggtaccttgatcataacatcattcctccatcactagggccatacccaccacctgctcacacctccctcagcagtgacatcattctacaagtaaatatatctcctgaaacacccatctaccatcctctccaaacctacctaacagcatggaggaatacagttacactaccaaatcttccagttgaagattcggaaatgactgatcacatcacctgcaacaccatcaaccagcctcaaaccataacctcatacaacaataccctacaaaccaaattgcagaatcgatttttgaataaaaataaatcccaacaaccttcaaatattctttatcaggacttgaatcatctatcttccaaactccaccaaaacatcaactatatcaacaccaatactaaaacttgggccaacaatgcacagcttggtgaccaggaatggaaaaacttctttaacaacatcaatcaacatatcttcaccaaaccccaagattactactacctatatgcacttaacaccggattactaaacaatacattttacaatagctgtctatgtggccttccattcaacgggacgccaattagacatgttattaatgaatgcaacatcaccatccacatattcaaatttatcaaaaaccaatcaaatcaacaaaatacaccacaattctccacaaatattttaatttgtccgcaaaaaccacaaacgtcgtcatttacatttataaacactttcattaaatttcttgtctattgtcatagggtagcttatgccaagagacctgaaatattacaatgggaaaatgagaatattatagaagatacttactgggatttcaaataccggtaaggcttccatcttattcttaggtttcaacacttcacaataatcacacaaaataataaacaatttaaccatttatacgtttctttatcagttcatttactctttaagttctttttcatttttcatttaattttacaatataacaaaagggttttataggattttcctttcccttaaccggactgaatgttttattatatagcatttattttagagaaaaatatttatagtatcttttataaatttatagtaatacaaaagttgaccggaaaaaaaaaaaatattaactcttcaatttcacaagagtttcctcttttgttaattggttgtaaccaaccaatcagaattatcctaattcattctcaacttcgagaatgccaacctctcttattacttatcctccaaattacaattattaattatttacttattattatacttatttcttttcttttattttatattattttatattttattttaacaagtagttccttattaaattaccgaccgttcattctcagttttagcccggctgctactaatccctgttttatattttatgattacgtaagctagttgtagctgataactgcttgttgagatttaaatgtttcattgtaactatagatagatttgttaaaaggtaatgttgagatacaaatgtttcattgttgctataaatagatgtgtttcacctatgtttcatctatttataaataagtttagaccatatgatattggtaatacttgtgattacgaatgtctcatattatgatcaatacaaacatgaaacatttgattattaatcaaaacaccaattatcttagacataaatttgtctatataaagagaaatttccacttcctcttaactgttctttaacttactaattgtttttctttcttaacttatacaccgtgggaaattttgtgacttttttacatagtaaaattttcaaaacccgcattttggtggggctgcaaccattataattcaaatttgttcgattttggggctaaaaatctgttatatttgttacttctgcgaatatgacaattacgtaataatctaataataagatatactaaaggatgatttctctatagctctataagaatctatataaaagaactacataactattagttatttccacatattatatcctgtgggaatttggcctcttatacatatctcatgtaacgagttgccccgttacctatattatgatattattactatcaatatatcatttacttacgtaatatatcttacgtaattaaattctatatttatatcatccctgacaaaagcgtaatcgtatgtttctttttgtattttaacaatgtgtaagttttgaagggtctcaccggtatatttgggctctccgagactgggggatcctaactaatcatttaactttaaattttaaattttattacgtaatcatggtggcttgttacgtaattcttatttaaaaatctcgatgagttacagagacgatacgcctgtgtttctttcttttttatgggaaaaagtaccaacgatactggaaacagatataccgtgtgtattttcttttactattaagaacgtaaaaaatattcgatacaaaaatatcaaatcttatcaggaagaaaaaggggatgctttgagtgaaagaaatttaaagagttttgcaacaagtacaacttcaaacttcaatttcttttataacgagagatcagggtaacacacgtatggtggtattcaatataataaagctattgataaaattgttcaacaagatatcaatgatgatattgtgactcttgaaaataaatatgggtctgcgaatatcaataaaagaaaagctaagttcatttttaaacaattcaaaaatgcaaaattaactaatagaggttctttagtgggactcttaaatctatacggtttgaatattaagttcttaaccacactgagagctagtgcaagaagaagacgtaaatttgaagatttggaaaaaattaaagaatcatcatacaatttcatgaaatacaaagagagatcaagatattgcagatacattgaatgaaatttttaaatgttattttaatgaaaaaggatgggattacaatgatataatagattcaccatccattgaaataaacaattgtgacgcatacgaaactgattacgttttaactagtgattttgggagttcttctggtgatgatactttttctggaatgtcggtagataataatcattcaaattttaataatattaatgatcatgaggttctttttctcatgcttttgatgatgggctatcatttcctgataatatcaatgatggcgaggttttttctgatgcttttgattcattccttacagatgggtttccaattcctaataatatcaatgatcaagttaatactcaagttaataatgtgttacgctcaaatggttttgattctggtaattctagctcttctgaagatagtggtaacgaaggtgatgatgatgatgatgatgatgatgatgatgatgatggtagttttttcatgatgcttcagaaataatgcctgacgacgatgaatctgattattctgatgaaagtagttaagatgaaggggaaaacaatcaagatgttcaaccagaaaacctttcaaataatgatattgtctgggatctctttagaactgcctgttcctttgttatttattggatggcttcaaggcattttataatcatgaataaggctaacattgttttgagttttatggctttatttggtttaattgatgataaagatctagaaataagacgtttaaatgaaagagttttaaaagaatgtgttgtattgaggttatcctatttgcaaagtccatattagttataataataattgtattgttatttaaattagataaacaaaagtaaaataaataatataaagaaaagaagaggaaatacaaataataaaagtgggaatacatgttcccttatatagttatcaaaatgaacatgaaaagcaagtgcttacccctctttgaacaaaacccctccgagcggggtttatttaaagtgtgaccatcttcgggagtaaggaatgtgtgaccgtcttcggcaacatggaaatgaacatgcggggtaaggtaccccactttgagtttagattaaccatctcaacagaatggcataaaataggtaccatgtaaggatattcacaattttgtaaaaaatgttcaaaacatctttacttttttgaaaataaagatactcaagaacatactgtacaaattagggtagatagtaggtgggttaattgttgagattgttgagattgttaattctaagtgagactgaataataaattataatattgtattattaagttgaacctcgaagaaccaatcaaaatttagtgttgctcgcaaatcaggaaaagaaattattagtcaacgttggaattcttagtatagataaaacgaagaatttcaaggtttgttaatattacttttatgttgttttttcttatttattttatatttatttatattttatttagtttatttaaataacttttactgttgttaataatggacgctgcatctagagtaatcagattacaacattaatgaggttcataaatgatctgatgatgcagaatcctataaatatgaatgtattactccagttctttattcactcttcaaaaataaagaaattagacagcatataaaagatgaaagggagaaatggtttacaaataccgatacaattgctactgtttatcaatctgatagaatgcgtagattttttaaagctagtagtaacaatccaaatgaatttacatttaacattcatgtttctaatgatgattgtaatttgcaggtaaagacttataaaggtgtcaaggtcaactgtgtcatgattatggatttaccagagatgataagatacaaaaataactttatccatatcccagaagtaatattaacaaaaactgatgctgctggttatacgggtattatttgcagacctctaattgaagaaataaatcaactttcagaaaaaggtttcaagtttattgaaaatggggaagaaattactataaaagtaaaatttattaccattttctgctgatttgaaggcattggctgcttcaacggaaacacttggcccaagctccaattttccatgcactttttgtgaaattcataggacgacagataataaaattctttttactcctattgttgcagcaatgcgtagaaacatgttgagatattaatctaaactaggattcgaacccgtgactataagaatcaaaacctttagaagaagaaaccctcaacaagaatttgaaaccctcaccataagaagagaaaccctcatcaagaagttgaaaccctcaccttgaaaaatgaagtttttcaaagtgaaaatcttactatataaaggaacatgtattcccacttttataatttttatttcctcttattttctttatattatttattttacttttgtttatcttatttaaataacaatacaaactatattttaacttgcttattaaaatggattttgctaatagaattacccttatacaacaaaacagaaatgggattaataatgatgataataatgaggtaaatgtttataatttttttgatgagattccagaaatagatgtcgatgatgctgaaaaggtatttagtgacttattagttacaactgaaacatatttgtcacgtatgcgagagtctttagggcgtattaataggacacaatggagggttaaggcaaaatccttgatttcgtatctaaatctcccagatttcttcaaaaaagtttgccctgatttaatgcatactgcttatcaaaattttataactaagagggtggtaagtatattggtttctgctgtattcaaggctctagatcctgtctcttataaacaaattattgaacacaaaaaaggtattgatgtttttttgggaactgtaaaatttattgaggaataaaaggatatcaaaatctatttaacaaaagatatgactgctagtagagttaaagctgttgatgtaaaggctttttcccatattttcccattatactttttgccacttgctgaagaactcaaggctaatcatccacttactccttttcagtttttagttaaaaatatgatcgagttgaatgcttatgttattgctttggtggctaccaatgttccattgtcttttgttgataatgatggaagaaatgaaatgaaaagaagttacataaaattgattttaaatttggaacgattatttgaaattcctgaatataaaccaatatttagtaatttttttagtgtacctactcatcaaatgattcatatgtttgatatgtggaaatcggttggttcttttagagattgttggtgtttttttactgaaagatgctgctgcacagtcaggaaaaagcttagtcctcataaaaacagtttcaaaaccactcaaaatcaaatgcctttcttagcaattgataattgcaaatccatttataaataaatataagaatgatccaatgagttgttatcatattccaaagtgttgaaagattttgagggatagtgatttggaaatgcctctttcagaattatatgcaaaaggagaaatttctgaagatgatgtggttgttttgagagaacagagacatttttgttctcaaaatacattcataagcaaagagggtgcaacaagatatgccaaattcaagagaactcctggcaatatgtcaaggttgaaagactaatccatgttgaggtgaacaatcgttctaaattgttaatgaaattccaaagagtaaatattgagcacgattggatagaggcttattcaggaaagttagaatttgttttatattctagaatgcttgattctgatactgaattcgaatggaggaagttggataataatgttgaagtatttggtattcatgttttagaagaatatgataatatcattgcagataaacatcccgagttcaataatgtcttcagatttgcgaccgagcaatagtttactatatatctttgtttaaatattttaatattagaagaagtacttgcaacctctgaggttctaacattgcacgcaaacattcaacaatcgatatatcgtcgttagttattcacatgtagagaataaagaaattaaagatattacgtaatgtctttgttttcaacatgaataacctaaacccgaactcattagtgtttcaattctgtaactcttttccctttccagctctttctttagaagacacaaatggcgcaaacgtaagtttgtattttatttattaaatcagaactaattcatactaacattgaattaaggttacaaaaagaaaccttttggtcttaccattttttcatttccaaagtagaaatattctcagtcgaaagttgctgaaaagtgtgttcagacatataaattgttgagaggtttaatctaaacataatttctaagcctcaattaaatgcctcaacttagcctcaattaaaatgcctcaaagtatcatttttcattactatataagggaacagacaatggattttacaaatagaattaccctcacacaacaggttatgagttcattctctcacttgtgtccaaagtcatctattaatactttgaaatctgctgaaaattatcacaattgggatgtgggtgttcgctccattttgttgtataagggtaattctattagcaaaatccattttaataagcaagttaaaatatagtttgtattgttatttaaataagataaacaaaagtaaaataaataatataaagaaaagaagaggaaatacaaataataaaagtgggaatacatgctcccttatatagtaagattttcactttgaaaaacttcatttttcaaggtgaggtttttaacttcttgatgagggtttctcttcttattgacaataatcatttagttttcttgtattgaattcattatctgatctaatgtagcaaatacttttgtcttgttgttttaacaaattattgaaagtcttaattgttgcaatagctttatcggaagcttcatttttactttgaagaatgtaagaaaaaataacttttgatttatggtctacagaaactatagcatattcattatacattggaccaactaaatctgtatggattaactcaccaacatcataatcatggttatcagtaccacctttggttttattgaccatactcatgcatgtgaagcatttagtgccatttggatttttaatccctaaagttttcatttgattttcggatgcatgaccaagttctctatgtttctgtaaccaatcatcttcttcatcttctttattaaaaatataattatcatctaagtcaatcattgaatgaacctcttccttaatagtgaaagtaaattttgcaaaatacaacatgtttctaagttctgcactgataacaattttgtcatttttggtaacttgacaacctttatgggtgaaagtagcttttaaatttttatcgttattcaatcttgaaacagaaatgatgtttcttggtaatgatgttgctaaaacaacttgtttcaaaaccactccatttgataaataaacatcacctctggtcttgtaaaaattaccactatcaatagatgtcaaatagatattacacgcttcaatattgcataaccatttcttatcattcacaacatgtgtagtagcaccggaatcaattaaaaattcatctctatttgcagatccatccttgtcttctaagacattgcaactaactttttcaaccgtaaattcttcattactcttcaattcttctacatgatcattctgttcacaactgtgaaccgtcatgtttgcttcatgtctttcagctaactcagtttcatcaatgagatcaaccataccgattaaattattctcttcaactttagcggccttcttgaattcaggacatttgtttctgatgaggaccgccaaatttgtaacatttaacctttttcttcttcttatcttcagaagaaacaatagcattaatttcctctttggaatcccatgcatcaacgttttctaatttaaaataacagtatttttgatagacttcttggataaacaatgattcaggttgtaatgtatcaaatgattcataacaacccattcttttcaagaaactgttgaataagggtaatcctattagcaaaatccattttaataagcttttaaaatatagtttgtattgttatttaaataagataaacaaaagtaaaataaataatataaagaaaagaagaggaaatacaaataataaaagtgggaacatatgttcccttatatagtaatgaaaaatgaaactttgaggcattttaattgaggcattttaattgaggcattttaattaaggcattttgttgagatattaatctaaactaggattcgaacccgtgactataagaatcaaaacctttagaagaagaaaccctcaacaagaatttgaaaccctcaccataagaagagaaaccctcgtcaagaagttaaaaccctcaccttgaaaaatgaagtttttcaaagtgaaaatcttattatataaaggaacatgtttcccacttttataattttttatttcctcttattttctttatattatttattttacttttgtttatcttatttaaataacaatacaaactatattttaacttgcttattaaaatggattttgctaatagaattacccttatacaacaggttatgagttcattctctcacttgtgtccaaagtcatctattaatactttgaaatctgctgaaaattatcacaattgggatgttggtgttcgctccattttagctacttttgggtccggtttattggaattttttactgacggtgatttattagtctcaccggatactccggccgatgaccctagtgttgttcaattaacattttatcttaaccgggcccttcaagttgtccttattaataccgttgatggtaacattatttccaattatcaatgtgaaggcttgtctggttctgccttattagcagcaattagaagagattattctagattgtctgctcgtcaactttattcaatggttgacaaattaactaaatcatcctctatgccacttgacaaaggattattatttttaaagaccatgagatctcaatttactcatggcatgactattgatcacctgttaggtcttttatacctacaaatgtttcgtgatccttcggtcaattcaagaattttagatgctgctgatccccaaattagtttatcagctattgaagcatctcttaaggatattgctacctcctcatcttccaatggtgctccttctgctcaagcttttattgctaacaagccgaaatctagaaacagaaaatcaaagacttcaaaagatgttatttgcagaagatgtcaacaatctggtcatatttctccaaattgtactgctgctgttcctatttccactaagccaactaacaatattaataattctgaagtttctactaatgatgttgcttggcatgtttctcaaccaattgttcatgctggtgacacttatactcttgattctggtgctaatcttcatatgactaagaattttgaacattttagtgattatgtttctgctacttctgttgaaactgtttctggtatttctggtgataatttacaaattatgggtagaggcactgtcatttttaatggtaataatggccaaagaatttcaatcagtaatgttgcttatgttccaaatacttccagaaatttgatttccattaaagcaattactaggaaaactggttcaagaatttattttgatgaaggttattgttatatgcaagatggctcagttattggtaagtatttttcaaatactttgtatcaatttattttcttaccaattatctctgaaaattattgtttaattgcaaatactttgaacatgcattccagattgggtcacccatctggtagggttatgagggaattgggttatactccttcctctgatgttaaaatttgtgaacactgttctgctggtaaaatgactaaggttctaccaaaatcatctacttttaaagcaactcatcctcttcaattgattcattcagatgtttgtggtcctattaatgttcctggtttatctggtgaaagatattttttaacaattgttgatgatttttccagatggtgttcaattttacctttggcaaccaaatctgctgcttcttcagttattaaacaattcatcaacttttctgaaactcagttctcatccaaaggttttaaggttagtattattagaactgataatggtactgaattttgcaacaatgatttaaaacattatttacaagataaaggtattactcatcaacttactgttccatacaattcatctcaaaatggtgttgccgaaagaaaacatcgtactgttcaagagaaagcaagaactctcctttctgagtctggtttacaatttaatttttggtctgaagctgttaaaactgctgagtttattatcaatagatatccatctgatgttctcaatggtaaaactgcttacgaattatggatgggcagggttcctaattattcaatttttcattcttttggttgtaaatgcatggtattaattccaaaggaaaagagggaaaacattttttcaccggtctcagttgctggtatttttgttggatatagtccagcacataaagcctatagggtttttattcctaggattcaagatgttgttgtttcaaataatgtcaaatttgatgattcctattttccaatgttagactctaaaaacaatattcctattatggaggacgtttctccttctgatattttctatggtggtaatgctggtggtgttcctgttattccatctggtgcatctaattctgctgaacctcttattattaatcattcaccggttcaatccccagcaccatcttcaccagcaccttcctcctcatccacttcggatgctcattcaactacttcatcatcaccatcatctccagcttcatcatcatcatcatcatcatcatcatcatcatctgctccagtatctgcttcttcttcacctatgatgcaatcttctggggttgttccagataatactgaaatggttcctaactctcctagtgttcctgaaactgttgcctctgttccaatttctgatgctattgataatattatttcacaagaagataatggtgtttccaaattttttcctgatgaagacaaattagtttcatctggtgatgaagaagaaattgattctattcctaatgattttgcttatccagtttatgatgaagttcatcaagttcctattgaaccatctttacttccattacgtcgttacagaagtgataccacttcagcatctattactcaacctccactgcaaaagccatgtttcaaaccagaaacacttgcttcatcatctacatcatctactacaccatcatctaccacttcatcaccagcacttgctccagctcaaccatctgctattgttccaatgcaaaggtccttgtctcagctctctgatattgttgattcagttcctaagcgttccaaagcattatttttaggttccaatgccattcacactgctttttctgcatctactactgtttcatctgctttaccaactacttttaatcaggctgttaagtcatatgacagatccttttggttatctgctatccaaactgaattagatgctcatcaattgaatactacttggtctttggttcctcttcctgctggtcgtcgtgctattggttgtcgctgggttttcactattaaagattcaacatcaccacctacttacaaagctagattagttgctcaaggttttaggcaagtttatggtttagattattttgaaacattttccccagttgtcaggtatgaaagtattagaattgttcttgctatctcagctcaatttgacttaaagatccatcaaatggatgtttcaactgcatttttgaatggtactttgaatgaagaaatttatatgatggttcctgatggtgttgatgctccttctggtatggtttgcaagcttaacaagagtctttatggtttaaaacaagctcctttttgttggaatcaagctatcaatcaagttttattgtctgctgactttcaaaggtgttcaaatgaatatggtatttatactaaggtgttttctggctctattgttattgttgctctttatgttgatgatttattaatttgttcaaataatcctgctgccatttctgatgttaaaggtcttctctcttctcactataagatgaaagatcttggtgttgcttctaggtttcttggtatgaatttacatcaatctgaaggaagtgttggtttatctttaaatcactatctcaatgattatttggttgattttaatatgcaagattgcaatcctgtttctactccatttgctgctggtactgattttttgcctggtgatgctatttctgatgctgatgttacccgttttcgcagcatggtagggaagttattatttgctgctaacacttgtcgtcctgatttgtcctatgctgcttctacattatcaagattcattaaagatccaagagctaatcatattgctgctgctaaacatgtcttaaggtatattaaaggtactgtatcatttggtttggtttataagaaggtatctaattttcaattgattggttttagtgattcagattgggctggtgataagtttgatagaaaatcaattactgggtatgtatttatgatgtctggctgtgctattacttggaagtctaagaaacaacccactactgcattatcatctactgaagctgaatacatggcacttggtgatacagttaaagaactactttggttaattcaattgcttaaaactgttggtcttaaattcaattatccacctacaatttttgaagataatgaaggttgcaagttgcttacaagtcatcctgtccatcatcaaaggacaaagcatattgatatcaaacaccattttattagagagcatttaggtaacaaggttttcaatttggaatcggttagaacagatgaaatggctgctgatatgtttacaaagaatttgaatagaatgaagtttagaaaattcaactgtaagattggtatgactcctatttcacattttggttaagtttagattatggtagggtgttgagatattaatctaaactaggattcgaacccgtgactataagaatcaaaacctttagaagaagaaaccctcaacaagaatttgaaaccctcaccataagaagagaaaccctcgtcaagaagttaaaaccctcaccttgaaaaatgaagtttttcaaagtgaaaatcttattatataaaggaacatgtttcccacttttataattttttatttcctcttattttctttatattatttattttacttttgtttatcttatttaaataacaatacaaactatattttaacttgcttattaaaatggattttgctaatagaattacccttatacaacacattttaattgaggcattttaattaaggcattttaattgaggcttagttgaggcattagaaattatgtttagattaaccatctcaacaattacttatacgcatatatcattcatgcttcatcaattcaatatatcttcatatactgaactcaatgtaaattatttttactaggttattctttgacctttttcttctaatttagatctaataagaactaaacttttcatattcgaataccaaatatgtatctgtgataaatcttttgttaatcctaaactctggatcattctttttgcttttttagcattgtttgttgaaaaatataattaacttgattattatatttgccttataagcatcttcttttgataaaattgaaccaacaatattctttagatcaatttctatttctaattcttttaagattctttttatgcctttacaattgaaaaagacatgatgagtcccaccttccccttcgcagaattggcaagggtgatagaaatgagagttcaacatccctgtttgtatttcaaacaattcattatagtcagcatgattttgatttgtgattctacccaaccaaccaaagcatgcttcccaatccaattggttttctattttaccatcccagtaatctgaattaaatttatctttaaattcttctttgtaaaatctttttgaaaaatgtttaaatgattcaatattgatttcctgatttttattgaaaatttctacaattttccatttttgaacatttttttccaccattgaaaataacgatgttgtattgaagtctgtagtttctttaacctgaaaatctgagtgaatattagtcaaatagtaccatccctgcaaatatgggaaaatattagagtacaccattaatggtgctaatgtttttgaagaagcttcatccatgttgtaattcacagggtgttcgataatgaaattgatatttggttcaagatcgattattattttccctgtatttacatttattattttaggttttgcaacctttgacatttcatttgaaagagtttcttcaatagtaatattacttccccatattttatgagttttatgcagaagaagattgagcggatatgttgaaattaatccatttgaaatagtgcctggtatttttatttttggtaaatttccaggtacagctctatttgatagtatgtaattttcaacatatttgtaataacaatgataaacatagtgatttctgatcataacattaataattccttgtaatgagtgtgagatgattaatgtcaaaagatgttcatttataaattttaacttctgtttaatagtcgttaataaatgaaatatgctcttctaccttgaagttgtttacccaggtcgatcagacccatacccccatttttgtgaggttgatgctatttgattcttctagctgcaattttcagcggtaaatatttaactaattcttttttaacatgattttcaaaagaacttaaaagaggatccggaattggatcatgttgatcaaaataatagatagtggaatgaatgtaagtattaacagctactactctttgatataaatttagatctaaaaacatagttttccttagtcttgttttcaattggtttattttattgcaccagttgattttcaacaaggggattcctagataaataggattttctttgatatctaaaattgatagcttcaattgatttatattagcaaattgtttgatattattgatacctttattattaataaaaattattgatttcttttcatttattttaagatccgaaatttgagcaaaattaattaaaattgatagtgattttaatagttcattattgttctggtgaaacagacatatatcgtcagcaaaagctagaatattgataaaaagcttagcatttaaaccccttcattgtatggattgtatttcattcctctaattgattgatggagtttaatgatcagtggttgtattgcaagattgaatatcaggggtgagaaaggtaaaccttgtcttacacctcttcttaatggaatattaaatttatggatccaattttgattaactatattagccgatgctaacatagattggttaatagttgcttcaatagttgaattagggaacccaaatttttctaagatttttttaagatattgatgatcaatagaatcgaaagcttttttcaagtctactaataatatatgttgttcattggataatgatggtgatgaattgatttgattagcaagaattcttgcagtttcaatatgtaaatgaatatttctgtgaagcataaatgcttgttgatgatgggaaataatcctgtttgcaataggcattattctattagaaatagaaaagttgattaatctaagtgatgaatttgtaagactgataggacgtagatcatctattggtggaagatcttgtcgataactctttttgggaattaattttatcaatactttaccaatcttatcggttgtggttaaattgccttgaagaatgtaatttgccatgttggttagaatcacagcagcagaaacccagttgtttttccaatctttgtaagtaataccatcagtccctggtgatgatggaccattttcatttagccttagaaggtttttatatatctcttgttttgaaaaaggtttaattaaatcatttttctctttctcagttaattgttctttaatattttcagtgaacttgtcaaatttgttatttaaattttgatttgaataaatttcatttgatgcgaaaagatttgaataaaatgaatctgcatcatttataatattttcatccaaatttgcttcatttgaatgttttccaaatctaagtctaagtctcttgaagctttttgaaagattagctgagatattattgaattgaggatcattaaaatcaaatcctaattctttagatgatattttttccttatatgaaggtaaatgtttcattatctggattactttatttgttttccagcgaactctttgcatatatgcattataatccattgatgggtttttagtatccagaatctcattggtgaaaatgtatttatataattgtttattttcaataatgtagtcaggaattgatggtattcttttgtaaaaattatctttattaattatattattattagaatttgaattgatatctgataaagtacatactaccggtctatgcgttgtaaatggtagcttttgatgtactctgtatttaaaattgatatttcttagcagattgaaggaaacatggaaacgatctagtcgattatttgttccatttgaaccgtggttggtataacatatacttcttctattatttggaaggaagaagatatcatataaattattttccattaattgttgatgaagaaatgattcaatacgatttaagtttgttgcttccataggatgtgtattccaatcaccacaaatgattagatttttttcaccacgagataatgatgataaagttggacataatgtgtcaataaaatcttttttgttaatgcagtgaaatctgttatcattaacattattgtaaactggtacataaacagagatgatagttaagttttcttgtttgaagtttattgttatatcacagacataaaagtttgcaagttgattatcacgattatgccttggaaaaatgttatttgaaattatattaattgatgaatggtaaataattgctgttcgatgttgaacagattgaatcgcaattttgaagtcgaaattgaataataattgttgaattgaagataattcagttgattgatttagatcaaattctgtaagacacacaatttgaatttttttattttttgcataatttagaatatgaattaatttagaaggactagttgccttctgaatattgaaatttaaaatttttaacttattcattatgatccctacttataatatgttttttagcgatttaagaaaattttctgtaaacctaagtctttggtttcctcctcaccaatatctcataaatatcacgtttgtagccgcaatttttctctatccaatcatgtacttcgtttttagtttcagtaagtattgactgagttgtgaacgtttttagtttcaaatttgcgttttttgacaaagtcctgtcagatggccattaaccttgagcacttcggacatagctcattgtaatctcatttcttggttgtaccgaaaactttaccgttatattgtttacaaatagtgtagtatttgaaaaaagcttgatgaagttagtgatttttttggtgctatttttgggcacttttttttgatttttagaaaattgggaattaaatctaaaaatgtctctctgtagaaacacaattattttatttctctttccaatagtactattgatttttctgtagctattctgtgggaagccagcaattgcaccggaattaatgataaatcaccatacaaaatcggtgttaagcaacaacaaaacgtgtgtcgtgctttttggtgaaaaaaaagctatttttcgtgagaaaattcacttaaattattacgtaagattataaaatataattataagtagggcttctacattttccaacgggaaatgattgtctacacgccgatggggattaatattttatatttttttttttatttttatatttttatattttattaaacttgaagaattaaatgaattagacttgggagtctaaatccatttgagacttctttttttcaagtttctcttttctttctaatgccatttctatttttttagcatctaataatgtaccagttgctacactcttaccttgtttagaagatttaactaatgttctgacatttctaggttgagttggagtttttggcatacttcttgtagtttcagcatgcttagtttcaacaaccatatcttctatctcttcatcactatggatgttttcatcttcatttggaatttctggatcatccacatttgccaatacttggaaaggattgaccgcattatcaacgttactgactattgatgatgatgaatctgacctagataagttcttaggtttagatggaatagagaagccatctgaatctactttgtcattattgataacaacagctgcatctagatttaaaatgtttgtagaggtttgggctctacttcttttcccattaccatttgtagttgatgttcttggagtaacaggagcgtaaaatacttgatcattaaccgttgcgtttctaattctcaatgcccacagtggtaatgatcttgagagagtttttttgaagaaattctctcttgtttttgggtggagggaattaaataacctttcttgttcagcctccgatgattttggacagaaaatttctctgtgaccattctttggaatttcaccttctttgaccttatgtctaggattgtaacatcttctacaacttggtttcattggacatctagctgtagtgtggtctgtacatctgcagtatacacaatgtgtaggtgcagtagacaagtaagtggtgatggggattttatgtgtttttccacctgttgtgtgtgagatggaatgaattttaggtggtaaaactgatgattttagttttaacactgtgtaaataattttattttgttcgtagaacttcatattgaatgccattttggattctttttcttgtggtaattgacaagacataatttctccgtattctgaatagagatttttaataatttcatcatatttagatttaatgatatgaattaaatgtttctactaacatggtagaaactaattgtaataattccatcggtggttcagccaatggtaggttaatttttaaactgtatttatcagtattaaacatgtttgcaccttcttccattgtattctcagttggtgcatcaattggtttgctcatattattataaactttgttgatttttttatttttaataatattattgttgttgttatctttgcttttgtaataatcttcaaagataaattgaaactctttgtgcatttctgctaaatttgtagtattaatatttctttctaattcttttaagaaagaggataaaatttcttgtaatttttcaaggtctaaaaattgatctttgccaacttttagaaagtatgaaaggtgataaagatgatctttatcaaccgtaatatttgcctccgtaattgttttatggagtttttgagccaacgtcatggttggttaaggttctgcatttacctcttggactacttcatcttcctcagcgcaatcttgaaactcaatatcttcatcttcatcttgagtttcatggtcagtttgattcaaaccttcgttttctttttcttcagcaaagattgaagttaacttgttggactcaccatggggtaagtttgttgagatcggtaattctaagcgaaactcaacaatacataataatattgtattattaagttgagccttaaaaactggttagagttaagtattgttcgcaaatcagaaaaagaaacgttataaatcataaaaagaaacgttacaaattagaaaaagaaacgatagtaaagattggaattcttagtataaatacaacgaaaattccaaggtttagtaacgttccttttaagaagttctttatttagttttgtatttaatttattcatttatattttatttagttcctttaaataacttttactgttgtcataaaatggaccctgcatctagagttattagattacaacaaagttgggcggtttagtaacgtttggagggtcgggaggacctgaatcgtcgggcccctttttcaatcattttttttttaattttttatttttttttttttttttttttttttttttttccagtcaacttctgtattactataaatttataaaagatactataaatatttttctctaaaataaatgctatataataaaacattcagtccggttaagggaaaggaaaatcctataaaacccttttgttatattgtaaaattaaatgaaaaatgaaaaagaacttaaagagtaaatgaactgataaagaaacgtataaatggttaaattgtttattattttgtgtgattattgtgaagtgttgaaacctaagaataagatggaagccttaccggtatttgaaatcccagtaagtatcttctataatattctcattttcccattgtaatatttcaggtctcttggcataagctaccctatgacaatagacaagaaatttaatgaaagtgtttataaatgtaaatgacgacgtttgtggtttttgcggacaaattaaaatatttgtggagaattgtggtgtattttgttgatttgattggtttttgataaatttgaatatgtggatggtgatgttgcattcattaataacatgtctaattggcgtcccgttgaatggaaggccacatagacagctattgtaaaatgtattgtttagtaatccggtgttaagtgcatataggtagtagtaatcttggggtttggtgaagatatgttgattgatgttgttaaagaagtttttccattcctggtcaccaagctgtgcattgttggcccaagttttagtattggtgttgatatagttgatgttttggtggagtttggaagatagatgattcaggtcctgataaagaatatttgaaggttgttgggatttatttttattcaaaaatcgattctgcaatttggtttgtagggtattgttgtatgaggttatggtttgaggctggttgatggtgttgcaggtgatgtgatcagtcatttccgaatcttcaactggaagatttggtagtgtaactgtattcctccatgctgttaggtaggtttggagaggatggtagatgggtgtttcaggagatatatttacttgtagaatgatgtcactgctgagggaggtgtgagcaggtggtgggtatggccctagtgatggaggaatgatgttatgatcaaggtaccaggcttcttgttgatttcgttcatcaaaatgttgttgtctgtgttgctctctgaacatttccgagtatctgacggttatttttgatgggtggatggagatatgtgatgttgatggatgttttaactggttgttataatttgtggttagtaagtaccatggtgtaaaatgttgaagatgttgaagatattgggtgaagtgatgtgaggtttggatagtggttggatgttgttgatttagttgtattgcttcattaacttgagtttgaatggtgttaatggtattgttaatgtattgagaatataacagatttgattgaagattgattcggagaagttggggtaggtatggatgctttgcacccgactgggaaggatcgagcatgtatagtatgaaaaatgctcttcttccctgtagttgggtttcaagatccatcattccgaatcctccttgttttcttgggatgtaccaatagtctttgtttgtagggatttttggccatatttgatttctgactattgatttaacattgttgataaatgattgtaaggtgggtgcaggtgtaggatcatgttgatctaagaagtaaagggtggagaagatgtaagtgttaatcccaagtataattaggtgaagtggaaggtccatgaagcaaattcttcttaatcgagaggttagtaaatccagctttttataccagttggttttcatcaatggtactcctaggtaggtcggattttcggtgatggaagtcacctcaatatcatctgtggttgttgatttgatgtgttgaattgatgatgggttgcaatatagttttgttttttggtgattgagttttagaccacttatgttttcaaattcagagaaaatttggatggttttcttgatgtcgatggagtcttggttgaaagtgataatatcatcagcaaaagcctgactttttactttttttgtgaaattgctgagagtggttgatggggtgaatgaggttagagggttatagatgataccgttgatggtggagtttattttgtttaataagggttccaagcaaagattgaagatgaggggtgataatggtagtccttgtcgagttccattggatatatcgattttgggtcgatatatgaatttaccattgagaagttgggtgaaacctgctcgaaattgaaacattattgctttaatgaacgttgatggaaaattgaatttcttaaggatggtggtgatgaagttgtggctaatggagtcaaatgcttttttgatatcaactagtaagagagaggcgtgtgatggtggggcagcattgatatagtttgctatgatctttgctgtttgtatgtggaggtggatattccggtttggtaagaaagcttgttgatgtggtgatattaatctgttgaaaatgttcattgatcttctggtcaatgtatagttgtatagtctaaagatggtatttgttaaagagattgggcctgaggttcccgggattgggttctttaggatcaaaattcttttttggtattagtttgataattgagttaaagattgatgattgagagttgacggtttgagatgcttggctggttgagaagtgtatttgattaatgaactgaatgatatgaagttttgaatattcccagctgtggaaccaggcagcatatgtgatgccgtctggtccaggtgatgaagggcctttttgatgtagtgctttaaggttgttaaagatttctgtttcttcaaatttggcattaagattttgtatttctgaatctaatagctgtggggctatgaagttggagaaaatggagttgaagagaatttctgtatctgtgagggaggtaatggagttgttgttgaatagagaatcaaaaagtttgtgtgacttttccattgtaagtttggaaaaggttgtttcatttaagaaatttttgaatcgtttgttaagttgttggtaggtgatgcataatggattagagttgtgtgatgctttcaaatttgagtacagattttctcgggttgattggtgctctgatggaagaagtctagagagtcttttgactttcgaaaggcggtgttgtatacatctgatgtagtggtccatgctgagaataaggttatcttcccatattggtgtaggctggaatatgaacttgattaaatcagggtgtttggtaaggtgatgtgggaatggagattttctatttgaatatagcgatgttgggaatgaaggagagtgttgatttgaagaatgctttttccttcgagattttggtctgatggtaagcattatgggaagatgggttgagtatggttgtttttgaagtagtttgtatttgatggagtggtgatggagtaggttttcatgaatgtaaaaacgatcaagtcttctattttcgcctgtggaaaagttggtggggaggtattggtattttgttggagtccttgatgttgcgtcaatgcagtcaaggtctcccatggtatggttgaatgtgtggtttggaggagtgttccaatctccaaggaagattggattggtgaggttgattgacttgatgttggtgttgaagtggtaatagaaatcttctttggttattgtggtgagattagaaaagttgctggtgtgtgatgaagcgggcgcatatgcaaggcagatatgtatttcagtatcatcaaaggtcagtttgagatcggttatgtatcgattgtgagggcgttggaatgatttttgtatgatggaagtatcaattatttgattatatgttgtgtgattgacaaatatttgcactctggattcttcaatggtatttactggtctgaaatttttattttcaaacatttttagaatttgctctttagtggtggattctgttgtgatgtcatattcagtgagtgctattatgtcggggttgatggtgttgatttgatttagaaaggtggccgacttggatattgatttaagtttttgtatgttaaataatattaatttaaccatttattatttaatttttgattttttaatatgtaagaaaagaactttggagttgaattgaaaatgaaatctgatttgaaattttttatgaagtaagaaaaagaacgatctatcatgatagatagatatatattggtttttaccagggtagttaaaattgttttggaggtgagtgttcatcaaccagtgatgccttaaggcgtttgtcagatggttgttgaacatatttgtaagcttcgggatccattgattcgtcctcagtttggtcgtttatcgattgtgaattataagcattattttgagtgtttagtgatggttgattttaattagcattttgattgtcaaatgattgttcgttataattattgatttgagtgccgattggttgttggctatcgttatcgatagtgtttggagtgtttccaatgatttcatctgctttgagttgttctaatgctgtttggaaaaattcttgaagggtagcagggaagaaattgttataaatttcgatccattgtggagtagattcagctattttagcgtttttgaaggcatcccttacgtattgttcaggaagtagactaagtccttgtttgatgatttcttgtgaagctgtaggacagctgattagtttgtgttcttggtgacaatgagaacattctttttttctaattggacattgttttttgtggtgaccgagaaccttgcagtaagagcagaaacgtaggggggaattgacggtggtactgatgttatattgttcgtcatctagtgtgacttcataagtggttggagggactgagtggtgttttaaatcaatgaggacatatgcggatttaattgtggaggttttaaatgctatgtttattggccttttaggcggtttggaaatgtggataatatttccaaagtttgagtaaagttgttgtgctagaggttctgcaagagagtctctaacataagaaggatagctcatttttaaaatgacagcgttttccaatgtattttctggtggagaagagatataaatttcgtctgacttttcagcgacttggtgaaatgtagccatgagtttttgatataataagtcatcacatagtgctagtgatggtaggagtaggtggaggaaagtgaagttagtcttgatatcctcaaagcaagtttcacaatctgatgcaatatcagaaagatctttgtctttatttaattcatcaaaaatttggtttaaaaaagtgctgattgatttttccgtgaggtttctggagttggatgtaatcttgaatgttgtgtcatactttaggacattagggtactctgttttgttggagagcatttcttcaagttctggagggttgttaaaagcgattttgttggatgcaaagacgcgacgatttgtaggatgaaaatttttttggacgttttgttgttgtgttttgtatgtacgaactaattgggcgtaagttggattagctgcattaatgtggtttgtaggagcagtttgagagttgttagaggatttaggaatagctgggtaagtgttattgtttgttagattgtttttgttttgtaaattgttagttgtaggatgagtagtagttgttttttgttgaggaggcaataaattggtctccttcacatatagatcgtaatcagcccaatttgactcaggggaagatataattgtaggtggaggcctgttggattgatccctggcttccgattccgttaattgtcgtgtgttcggcggcataaaagtcggttgttgtttatttttatttttttatttttttatttttattttttcactttcaacacaacaataagatcccttggcccagttggttaaggcgtggtgctaataacgccaagatcagcagttcgatcctgctagggatcaatttttgcatcatgttatgatcatatctttttacacaaaaagcagtgataaatatatcttttatttttactgttgagatacaaatgtttcattgttactctaaatagatgtgtttcatctatgtttcatctatttatagaaaagactagaccatatgatattagtaatacttatgattactaatgcctcatatgatgacaaatacaaacatgaaacatttgattattaatcaaaacaccaattatcttagacataaatttgtctatataaagagaagtttccacttactctttactgttctttaacttacttattgtttttctttattataacttatatattattatttctttttataaccttgaagtaactaactatggatatctatactagagccgttaccgttcaacatttactgatatcatagggctttcttttagaaaatataacatcaaaaatacttaactatttattgcttacgtaatatagataagagatatcaagacatagaggagtaggtattttaactgtaaatgaacggatgcttgttaattcttatattttaattattacacatttgtgaattgttattaatgattatgaatgattatgaattacttatttaggaaataagattatttggaatactcgaataactaatattaaatatagaaatcatgttagaaagattataatagtttcggaatagattcgagaaacttctatcatccgcgagagagaaggttatgagaaatataaatattggaatactttcccaacatcaacatttaataatatcatttagagatacttccttaaaacatctagaagatcatctagtcgatacatagtcagtgacatagagaatccttatttatattacatagaaaagtagagagttacatttaattagattacatttatttatatttatttatatttattttaataagaactagactataacttaattaatactttattcaagtttaagaaaggatcggtcgttgttaactattacattccaattataaattaaagatccaacgacgaaccacgaccgttcactttcaattggtagcaccggtagtgttgtttaaactaccgtttttaaaatcaagagaaagaattagaatttaaatcaagtgttcaagttatccaaatttattatttcaaagttagtttacatttaagttcaagttattcaaaatacaaaattaaaaatcaatttatttatcattaattaatatttactatccagcaacattaaagactcaaaacaaattatttttattttttaattttgccacctaaatttattatttccattgttgcctatttattaatcattattactagaatttacaaatatcacatattatttacattagaatcattttagcaggaacacgctgattctacatattagttaagcaaatcaattattacattaatttattattacatttaaggcacactatatttttaacatattatttttaaggcatattacattcacatattttatttttatacatttaagagctcatcatgtttgctaatttagaagatacaattacttatagatcatacttttattcaggtgaaaacgacatcacgggtcaaggtgcaataaattttattaacagagtcaataaacatttttcagataaagaattaaaagaaggaaaacttcctgatgcatacaagatatactacacttataatcatttagaaggcaaatcattacgttggtttctcaacaagaattttgatattactacattaacatgggattatttcattaaagaatttgaaaattatttttataaagaagaacgtattacaaacaacaaggcaaataatcaagataattatactatgagatgcattaaagaatttttaaataacagagaccgtgacgtaaagcaaagaggccgtcacgagtaccattacaagaatcaatacaattataacaaatcgcatgcatacaaatataaagaatataattacaatagtttacatgcatacaattacgaagaatcatacaattataataaatcatatgcacacaatgaaacatttattcaaaagacagatttaccaatgcatcataaagatattaatagaaataaaacatctaaaagaaagaataaaacaaaggctactataaatactaataataaagaaacaaatgaaaataccatagtgaaattgcctactattattaatgaaaacttagaagtacaaaatttagaaaagaataaaaacctagaaattaatacaattgaaactaaagaaaagtccaatcacaataagaaatcaatatataaaaacattaatgaatccacaaatattattgcccatgaacatatgaatattaaaaacgtctatgaagacacaaatactatagcttatgaatctccaaacaattttgccttcaaatttgaaaatacttatatgaaagaacttaattataatgatcatccgactgatgaatctgaccattttactgctgatgaatctgaatctgaatattttactgcagatgaatttgaagaagatgaaaaagaaatttctgatttaacaaatacagttttgtctataaatactccaacaagtcctaatttattgaagctcagtgaaagtaaagaaaattatattaatcattttattaagttaattccagaccaattaattgaacctatattcctgccagtatgtcaaagctttatctcacaatttacctataatccattagtggtttcaccttacttaattgattatcgttataaaagaaagaaaaaatatcattgcttattagaatttacaaactacaatttatttaaatcaacattaatttaattacaatattataaaaaactatacttcatgtgaattttcaactcaatatttttacaatatctatttttgcacaattattaataatacttttatcatgcattatttccatcctattattaagattataaatttcgaattttcaaatattatattatttatcatttgtcaaatttaagtatttaatctcaacttaataagatctcaagattaacatttcaaatttattattaatcatatattattgcaatttattgttttacattgttacaaatttagatattaacctattagtgaaaatacacaatttgttcttttacctaactatcaaaacattaagaaatattatttttattacaatctattatttttcattatatttattatattaaaattttgccattctgatttcacgaatgaagagtctagtcataacattattttcaattgaaatttattattttattttatccaattattattttattttactcaattattattttatttgttacttatcattttatcaatcattatttatcaaattattattatattaaccatctatgaaaattatctttactctcaagtcaatatttatatgaattatcaattgtcccattatttaacaattagaacaattaaaatttattatgtcactaaaagaattattttatttagcaatcattttactacatttatttcatcaacttattaatatgtttgccctgttattacaccatcgtcacattataattacattattatcacatcattaacacatcataattaatatcgttgctaagttatatttttatctttattatcatcatattatcatcatattatcatcatattatcatcatattatcatcatattatcatcatattataatcatattattatcacattatcatcatagcattataaaattattatcctatttaacattgaataattccatatttatcaactgatttcgccgacgattaccattacattattctgatattattattatatgaatacttagatttttacaattaacatattgttacctgattgttactttatttatcatcataatattatttgaattatactatgccatcaaggtttcattattacatcaccatcagatctatattgttcttaaatcctattactaaaacacaattaaagattactttaaattatgtccatgaattattgatattattatgtccattaattaattaatttattattattaatatattatcattgcaacatcatttcaacatcatttcaacatcatttcaacatcatttcaacatcatttcatttattttatcatcattaggaaattatttatattcaagcaattatcctcattttatcatcgttttatcattagatattatcaatttaatatattatcaattaattcttagacaattgcaatttagatcattccatcatttcattaatccatatatttattccatttaacaattatattatgattactatctgaacatgttattatgatcaatttatatcaatgttactattaaatcattatgctttatcacctattatacattatgctcatttcatattattttaggattacttattcttattaatattaatgttagatcaataattatcattagtttattacatcatacatataatacaagtttatgtttattatactacattgtgattatcgtttcaatattatcattattttaaacgtatttcaattatatttacaagtattatattattatcatctcatgattattacctaacataattacaacaaagcattaatcacattattgtcatttcattatttattattaagcattgatgaacttatttatttgttgttgatcaaactatattacagtcattacaattatattatatttaaccattattatttccaatttaatcattttgtcaagatattattattttacttatcaagatattttcatttttatcttagagaaattattgcaaatagtgtctttatcattatcaacttttaagaaaattattatattatatttcagatgatcattattagaactattatttatttaactattgtcattgttgtcattaattatcaaagaagtctgatatcttatttcatctacaattattattacaattatcttcagttttatcattatttcgctcatcattatttttggttaatttactttctatttccatattgtctcacatattgaatattaaagttatgaatcaagatcaactatcaacttaaattgtcctataattttcattcaagatatgtagaagttatttttatttgaacttcgaggacgaagtttcccgagaagcgaggtaatgtaaatgaacggatgcttgttaattcttatattttaattattacacatttgtgaattgttattaatgattatgaatgattatgaattacttatttaggaaataagattatttggaatactcgaataactaatattaaatatagaaatcatgttagaaagattataatagtttcggaatagattcgagaaacttctatcatccgcgagagagaaggttatgagaaatataaatattggaatactttcccaacatcaacatttaataatatcatttagagatacttccttaaaacatctagaagatcatctagtcgatacatagtcagtgacatagagaatccttatttatattacatagaaaagtagagagttacatttaattagattacatttatttatatttatttatatttattttaataagaactagactataacttaattaatactttattcaagtttaagaaaggatcggtcgttgttaactattacattccttttttttttttttttttacattaatttcattaaaatatacaattttatacagattgattacttatacgcatatattattcatgcttcatcaattcaatatatcttcatatactgaactaaatgtaaattatttctgtttgattattctcaatctttttcatctaatttagatctaataagaactaaacttttcatatttgaataacagataagtatctgtgataaatcttttgttaatcctgaactctggatcattcttcttgcttttgtagcattgtttgttgaaaaatataattaacttgattattatatttgccttataagcatctttctttgttgatattaaaccaacaatattctttagatcaatttttatctctaattcttttagaattatttcgattcctttacagttgaaaaagacatgatgagtcccaccttccccttcgcagaattggcaagggtgataaaaatgggaattcaacattcctgtttgtaattcaaataattcattaaaatcaacatggttttgattggtgattctacccaaccaaccaaagcatgtttcccaatccagttgatggtctagtttaccatcccaataatcagcattaaatttatttttaaattcttctttgtaaaatcttttagaaaagtgtttaaatgattcaacattgatttcctgatttttattgaaaatttctacaatcttccatttttgaacatttttttctaccattgaaaataacgatgttgcattgaaatctgtagtttctttaacctgaaaatctgagtgaatattagttaaataataccatccttgtaaatatgggaaaatattagagtacaccattaatggtgctaatgtttttgaagaagcttcatccatgttgtaattcgcagggtgttcgataatgaaattgatatttggttcaagatcgattattattttccctgtatttacatttattattttaggtttttcaacctttaacatttcatttgaaagagtttcttcaatggtaatattacttccccatattttatgatttttatgcagaagaagattgaacggatatgttgaaattaatccattggaaatagtacctggtatttttatttttggtaagtttccaggtacagctctatttgatagtatgtaattttcaacatatttgtaataacaatgataaacgtagtgatttctgatcataacattaataattccttgtaatgagtgtgagattattaatgtcaaaggatgttcatttataaattttaacttctgtttaatagtcgttatataaatgaaatatgctcttctaccttgaagttgtttaccaaggtcgatcagacccatacccccatttttgtgaggttgatgccatttgattcttctaactgcaattttcagcggtaaatatttaactaattcttttttaacatgattttcaaaagaattcaaaagaggatccggaattggatcatgttggtcaaaataatagatagtggaataaatgtaagtattaacagctactactctttgatataaatttagatctaaaaacatagttttccttagtcttgttttcaattggtttattttattgtaccagttgattttcaacaaggggattcctagatagataggattttctttgatatctaaaattgatagcttcaattgatttatattagcaaattgtttgatattattgatacctttattattaataaaaattattgatttcttttcatttattttaagatccgaaatttgagcaaaattatttaaaattgatagtgattttaatagttcattattgttctggtgaaacagacatatatcatcagcaaaagctagaatattgataaaaagcttagcatttaaacctctctcattgtatggattgtatttcattcctctaattgattgatggagtttaataatcagtggttgtattgcaagattgaatatcaggggtgagaaaggtaaaccttgtcttacacctctccttaatggaatattaaatttatggatccaattttgattaactatattagccgatgctaacctagattggttaatagttgcttcaatagttgaattagggaacccaaatttttctaagatctttttaagatattgatgatcaatagaatcgaaagcttttttcaagtctactaataatatatgttgttcattggataatgatggtgatgaattgatttgattagcaagaatccttgcagtttcaatatgtaaatgaatatttctgtgaagcataaatgcttgttgatgatgggaaataatcctgtttgcaataggcattattctattagaaatagaaaagttgattaatctaagtgatgaatttgtaagactgataggacgtagatcatctattggtggaagatcttgtcggtaactctttttgggaattaattttatcaatactttaccaatcttatcagttgtggttaaattgccttgaagaatataatttgccatgttggttagaatcacagcagcagaaacccagttgtttttccaatctctgtaagtaataccatcagtccctggtgatgatggaccattttcatttagccttagaaggtttttatatatctcttgttttgaaaaaggtttaattaaatcatttttctctttctcagttaattgttctttaatattttcagtgaacttgtcaaatttgttatttaaattttgatttgaataaatttcatttgatgcgaaaagatttgaataaaatgaatttgcatcatttataatattttcatccaaatttgcttcatttgaatgttttccaaatctaagtctaagtctcttgaagttttttgagagattagctgagatattattgaattgaggatcattaaaatcaaatcctaattctttagatgatattttttccttatatgaaggtaaatgtttcattatctggattactttatttgttttccagcaaactctttgcatatatgcattataatccattgatgggtttttagtatccagaatctcattggtgaaaatgtatttatataattgtttattttcaataatgtaatcaggaattgatgatattcttttgtaaaaattatctttattaattatattattattagaatttgaattgatatctgataatgtacatactaccggtctatgtgttgtaaacggtagcttttgatgtactctatatttaaaattgatatttcttagcagattgaaggaaacatggaaacggtctagccgattatttgttccatttgaaccgtggttggtgtaacatatacttcttctattatttggaaggaagaaaatatcatataaattattttccattaattgttgatgaagaaatgattcaatacgatttaaatttgttgcttccataggatgtgtattccaatcaccacaaatgattagattattttcacctcgagataatgatgataaagttggacataatgtgtcaataaaatcttttttgttaatgcagtggaatctgttatcattaacattattgtaaactggtacataaacagagatgatagttaagttttcttgtttgaaatttattgttatatcacagacataaaagtttgcaagttgattatcacgattatgccttggaaaaatattatttgaaatgatttctattgaagaatggtaaataattgctgttcgatgttgaacagattgaatcgcaattttgaagtcgaaattggataataattgttgaattgaagataattcagttgattgatttagatcaaattctgtaagacacataatttgaatttttttattttttgcataatttagaatatgaattaatttagaaggactagttgccttctgaatattaaaatttaaaatttttaacttattcattatgatattttatattttttttttttaatttttatatttttatattttattaaacttgaagaattaaatgaattagacttgtgagtctaaatccatttgagatttctttttttcaagtttctcttttctttctaatgccatttctatttttttagcatctaataatgtaccagttgctacactcttaccttgtttagaagatttaactaatgttctgacatttctaggttgagttggagtttttggcatacttcttgtagtttcggcatgcttagtttcaacaaccatatcttctatctcttcatcactatggatgttttcatcttcatttggaatttctggatcatccacattttccaatacttggaaaggattgaccgcattatcaacgttactgactattgatgatgatgaatctgacctagataagttcttaggtttagatggaatagagaagccatctgaatctactttgtcattattgataacaacagctgcatctagatttaaaatgtttgtagaggtttgggctctacttcttttcccattaccatttgtagttgatgttcttggagtaacaggagcgtaaaatatttgatcattaaccgttgcgtttctaattctcaatgcccacattggtaatgatcttgagagagtttttttgaagaaattctctcttgtttttgggtggagggaattaaataacctttcttgttcagcctccgatgattttggacagaaaatttctctgtgaccattctttggaatttcaccttctttgactttatgtctagggttgtaacatcttctacaacttggtttcattggacatctagctgtagtgtggtctgtacatctgcagtatacacaatgtgtaggtgcagtagacaagtaagtggtgatggggattttatgtgtttttccacctgttgtgtgtgagatggaatgaattttaggtggtaaaactgatgattttagttttaacactgtgtaaataattttattttgttcgtagaacttcatattgaatgccattttggattctttttcttgtggtaattgacaagacataatttctccgtattctgaatagagatttttaataatttcatcatatttagatttaatgatgaaaggagggaactccgtttttaaaacaacaagtgtgttgttttcttcaaaagattgatccattaagttaagatcatatgaattaaatgtttctactaacatggtagaaactaattgtaataattccatcggtggttcagccaatggtaggttaatttttaaactgtatttatcagtattaaacatgtttgcaccttcttccattgtattctcagttggtgcatcaatttgattgctcatattattatgaactttgttgatttttttatttttaataatattattgttgttgttatctttgcttttgtaataatcttcaaagataaattgaaactctttgtgcatttctgctaaatttgtagtattaatatttctttctaattcttttaagaaagaggataaaatttcttgtaatttttcaaggtctaaaaattgatctttgccaacttttagaaagtatgaaaggtgataaagatgatctttatcaaccgtaatatttgcctccgtaattgttttatggagtttttgagccaacgtcatggttggttaaggttctgcatttacctcttggactacttcatcttcctcagcgcaatcttgaaactcaatatcttcatcttcatcttgagtttcatggtcagtttgattcaaaccttcgttttctttttcttcagcaaagattgaagttaacttgttggactcaccatggggtaagttgggcggtttagtaacgtttggagggtcgggaggacctgaatcgtcgattgtagtagcttttagggcccctttttcaatcattttttttttttttatttttttattttttttgttttatttttttgtttttatttttattttttatttttatttttttatttttatttttatttttatttttttttttatttttttattttttttgttttatttttttgtttttatttttattttccaattataaattaaagatccaacgacgaaccacgaccgttcactttcattaacatcaagtgtcagtttgtccgagtggttaaggagaaagacttgaaatcttttgggctctgcccgcacaggttcgaatcctgtagctgacgtttactttttaagtttatttgttaaattagcgaatagaatttttttttcaatgtttcccatcattttgtttgttaataaacttcattgcacttaacttaatgatagattaatacaaaataaacactttgtttttatagtgtactgtaatatttacaaccttcttaaatgataatacacgtaaatattcaagcacagaaccggtaaaaacgctatcatttacttccagccatgtatttattgattttaattgtattttaaaacaccaataacaatcattagattattatattaaaatattacactaaaccccagcaccttgttgttgagattgttgagattggtaattctgagtgagactgaataataaattataatattgtattattaagttgaacctcgaagaaccaatcaaaattcagtattgctcgcaaatcagaaaagaaattattagtcaacgttggaattcttagtataagtaccacgaagaattccaaggtctgttaatattacttttatgttgttattttatatactttaacttaattttatatattatatagtttgttcttttaataactgttgttgtcataaatatggatcctgcccaaagagtcgttagattacaacaggttatgagtcaaatttcgactctgttcccaagggatagtactgttaagttgtcttctgcggttaattatccaaaatgggagaactatgttggtagaatgttggccacagttggtgcaggtgttgatgtatattttaatacaggagacttgatgttaactcctgatactcctgatgttgtgagtgcccaaattcaaggtgttctcactctaattattcaatcgattctattgtgtactgttgcttcatcgattttggaaaagtttgagactgatgctgctgttggatttgatttgttgtcgttaataagaagaagatattcacacatttctcctagagaattagctgccttggtagactctgcggttgatgctagaaataaagggaattctcctggagaagctatggccatttttaagaatgtgtgttaccaatttaacaatactcctgaaattagccaattaatgggtttattttatatgaaaatgtttgattctcctcacgcgaaagctaaaattttagattgtccacatcctgatttatcactttcagctgttgaagttgctcttgaagattttacatccactgttactaacacatctcaagaatttaattccactgtttctaacaactcacaagtgtttaccgtcagaaacaacggaaacaggggtggaagaagatcatttgaaagaaatttagatgaagtcatatgtttgaggtgtcaacttcctggtcattttgccagaaattgtactgctcctgctccagcatctgcaactggtgttccaactaaagatgcattagcatataatacaactgcttctagtggtttttcatggatgacatctgatgttgtcttaccaaattcatcaaagtacttgctggacagtggttcaaactattcatataagtgtacaaaaagatcactttgaagattttaaaacaattagtggtaagatttttggtattgctgaagaagctttagaggttaagggtataggaagtgttaaattaattcatccagttactggtcatgaaatcactctacatgatgttcactatgttccggatgccacacagaatcttctgtcaatcaaaagagcatccaaatttggtagctttcatttctcagaagagaaagttcattttactcaacatgggtctgctgatcagttgcaaattggttctgttgaaggttctctatatttttctgattatttaccaagtataaatgttgcaaatggtaaatcaatgcatgctaagttaaaatataagtgtgatattcatggtcaaaatgatgtctatggttatagcgcgtctaataaagcatacagatgtgtcacttcttctgttgataaagaaggtagtttaaagaatggtagggctaatgatgagttttgtggcaagagtgatgatgttatcactccttcaaatgttgatgttgatgtttctgttgtttctaatgaggttgtagaagtggatccaaaatcctcttctccgttagaagatgtcggttgcaatgaatgttctacttctagtacagatgaggtatctgatctggattcagttggtaaccaaaagtatgatgacattgaagaagtagttgatgttcaggatgaaaatccaattggtatgggttttaatatgtgtgagttaagtaatgtttatgaatcagatatgaaggaatgtaatgaggtttctaacaatggttcaatggtttcaaatacagatgtaagtatatttaacagcatggtcgggaaactgatatctgctgctaatatgatgagttctaaagttttcaagtggttatttgctgttaatataattaaagcagtagtttactatgtcgtgttaggttttccatcgttcattagtggtgtcaaaaatgaagaagtaggtatgggtaatgatgataagccaaagtcatcgaaaggatttaactttgaaaataatatggttatggctacagttgacgatgatgaaatgggaaacttatcatccagaaatttaaatcaaatttttaaaaataatgatgcagatgttgaacatgatggtcaaaataatgattttgaaaaggaaatgattaatactgagcataaggctaatgatgatgtgaagaaagaattaaagcaagttaagtttgatgaaactagtttaattagaagaatacactgaaatgatggtaatgatttgtgagcatggtagggtgttgagattgttgagattggtaattctgagtgagactgaataataaattataatattgtattattaagttgaacctcgaagaaccaatcaaaattcagtattgctcgcaaatcagaaaagaaattattagtcaacgttggaattcttagtataagtaccacgaagaattccaaggtctgttaatattacttttatgttgttattttatatactttaacttaattttatatattatatagtttgttcttttaataactgttgttgtcataaatatggatcctgcccaaagagtcgttagattacaacacttgttcactattagcctaattaggagtagcaaaaagccaataaatacactgcttacgtaatcagaaaaacaaaaagctggaaaaaacaagaaacagacacaacataacaagcgcaagtggtttagtggtaaaattcaacgttgccatcgttgagcccctggttcgattcctggcttgcgcagttaattttttaaattatgttgcttctttttaataaacaaacaattaaagaatcgatttgatttgatttaaattttattcttattaattatttattattttatcaattactttaagtttaccagattatattcatatgaataatatcaattcatcaaaatatccagattatttaccaaataataataattttagtccaataaatacaccaattcataaaagaattgaaacattttgtacattaattcatagtagttcaattattttattaccaagtttatatttttatttatggacaaaaattaaattatggccaattttaattatttatgttatttattcatatttattagataatacaacaattacaggtgattcaatttttagagaatcatttaaaattaaaaatttatttatttataaaggatttattgattatttcccaattataactcatagaacaattaaattaccaccaagtattaaaataatttcgaaaaaattaaaatgtttaccagaatggacaaaatttttacctaaatcagttaaaaaattattaaaaatattaagaataatcaatgaaagggaaagaattgttaattatgaggaacatattggtccaagatatatgtttgtatgtcatccacatggagttatttcatttggtataacaggttcattatgttggaatggaattgataaaatttttcaaactggtaaattaaaatcatcaaaatcttttaaatcattatttaatggtataccatgtcatttacttacattatcagcacaattaattttaccattttatagagattatataatgagtttaggagttggattagttacaaagaaaagtattttatcaattttacaaaaatggcattcagttgcaattgttgtcggtggtgctcatgaatcattattagctaaacctggtatgaataaaattgtattaaataaacgtaaaggttttattaaaattgcattagaatcatgtaatttagaggaacaggaaggtaatgatggtgatgatattattaatgataatattcaaaatggtaaatgggatgaaaaattaatgagtgatattgcaattgtacctgtttatgtatatggagagaacaatattcataatgtttataatactactgaacattcaattaaatccaaacaatcaaggatacttagatttttccttaaatttcaattaattttaaaaaaatttacaggatttacattaccattagttaatagtagatcaatttttaattatgattttggattattaccatatagacgtaaaattgatattgtatttggggaacctatttatatttataggaaatttggaaataaagttggtgataaggtaactaatgaagaaattgaattttatcataaattatataaggatagattaattgaattatgggaaaggaataaatcatttgcaactgaatgggatgaaccattacaaattgtggaatgatgaagagtatttattattcaacaattttcaaatttgattcatttggtttcctaaatttatccttaccaaattcccaaacattttccaattcaataatatattgattatgccaataatcaatttcaaattgagttattggatcaccaaattttaaattatttaatcttttaatatgaattggattaccgaaaactacattaattggagttttataaggtaaaataccaaaatcataattaaagatacctcttgaaacaattattggtaaagtccaaccaaatttatcctttaaaaacatttgaaatttataaactacttttttaaatttattatcaccaatattattcttttcatcatcatcacctgtataataaacattataaatattattttcaccaaatgcataaactggtacgattgcaataccaaatttaaaattatcattactctcatttaaactctctaatgctaatttaataaaacctttccttttattaagtatgattgaattattaccaggttttgctaataatgcctctttagcaccaccaatgacaattacaatacttgcacctttattaagtaaaatttttaaattctttttaacaactgttgtaacacctaatgccattaaataatctctatagaaaggtatttgaaattgattaattaaagttgtaacaaaacatttaataccaggaaataatttattccaattattattagcattatttgtaaatccattagaaacacctgttgcaattataccatgtggatgataaccaaaaatgtaatttggaccaattctttcattctgttcattttcattattattaaaagttggtgataaatctgataatttatgaaatttaatggggaagtaatctataaggtaattccaaatgaataagtttctaaaagattcattccttttataccatacattaccattaactggagatttatcacggaaataatggaaaattgtgtaatatattagtaaaggccataataatttatatttccataggaatatgtaagtaattaagaataacagaatggaagtgttatgaaatacaacaattgatgattgtatgaagttttctagtatatttgtcattgtttaaaaggataaaggaggtgtatctatatatggtaaggtgataattttaattattagataagataagataagataataagataattttcatatattattataatatatattattatattgttataaaagttaaaatacaaacattggaactaattaagaaaaaagcattaatcataagaaaagaaggtaaggtataagtaagtaagtattattattattattattattattagtacatttatcaattataggaaatattcattattattcttttgattctttgaaggatttatctttaaagtatcatcaggtacagcactgaaaatttggaaattaacattaagatgatcatcaactttcataacacttgcaacattaccacatctataacaataatttggagctgaccaaactgtaacaacatccttttcagtaaaatgatatttaaaaccttccataactaattgatgagctcttgcaattaaatttaaattatttatatgattaaattctctagcaacttttgaaccaaataaccaacctgcacctcttggtgaaattgcccaagtatcaacattatcaggatctgaccaaactaaatcacagaatccaccttcatgaggtacctcttgagctcttgataaaactctaatttgatctaacattctaatttcaggtgataaacctccatgaatacataaaattttaccatcaataattgcacttaaagttaaaaaatcgaaaacttgacaacaatatttccaaaccattgttgaaccatatttattaaggcattcctcataaaatccataaacttgagtaatttgtctactttcatgattacctctaactaaagttatattttgaggatatttaactttaagtatcattaaaattgtgaatgtctctaatgagaaataacctctatcaacataatcacctaagaatatataatttaaatttgaatttgtaattgatgggaaaccacctgaaattttaaataattctaataaatcatgaaattgtccatgaatatcaccacatacagtaactggtgatttaactggttgaatatttgattcttccattaataaatctttaactttttcacataattgtttcatatcattttcaggtaatgctttacaattttttatatcttcaaaccactgatcaggtcccctctctggcattattattgtcttataaaataatttataaaagaaaagaagttattaataatactaaatagaataaaaatggacgattttcttacatagcgaaaagtctcttctcttattattattattaacttaaccaactctctacctgtgatcttgccagtccacttgacattcttaatccttctctaccgtaggggaaataagagatagtatagtataacgaacagatgaattgtattatacatgatataataactaatatattactcttgtaaattaatgaaaataccaatgtagttataattgacatgataaatgaaattgtaaatggtaatctatccaaagttattgcattagagaagaatttattcattccattaagtataataaatgcaagtaagaataatattgaacctaaggtccaaataagtgaaaattttcttggctttagtgataaaattgggaagaatagaaagcaaattgaataacatgtataacaaccaagtatacaaactataaataatgaaattttttcaaaatatgataattggaatgataatggtaatgtagattcaattactggatcttcattaagttcaatgggttcatttctactgaatatattaatattaaacattgcttagtaaatgaaagtaatataaagtagattaataaagtaaagaaaaaattacgttatcttatctttgagctggtcttgcagttgtaattatcaaagtatttgaatttgaatttgaatttggtttatgtttcttattcaatggttctaaattatctaaaaattcaagtacttcatcatcatcatcaaattcatcatcctggtcttgttcattatcgttattattacttactactttcttttcttgaacattttcaattatatcactaaatgatatatcatcactgaaatcactaaaatttatatcaattggtttactacgattattattattattattattactatttttactactactgaattcaataagattatccaatgattcattatctgaatcacttaattcaatattaaattctttattaatacttgaaacaggttgaaatcctggcattgatttaacttcttcaattctcttcatttctttctctttcttctcccttttcttctcctttaataaaatacttatactcttatcaatttttaccatcatttctctctgcattctttatctctccatatgctaattttaaaaattcatcatcatctaaatcactattctttaataaattctcattatcaacgggcataactaatttctcaaatacaattttaggcattggttcaataattttattattaccattttcaacttcaaagaatttaatcatttttaaattattcattaaatgattttgaatatatttataattatcaacagatttttcaaatttattcctttcattaccactgaaaagaaatataactttaccattacgtttacgacctgttctacccattctttgaatatttttaattgatgaacttgttgaatcaaagcaaataattaaatcaacttctccaatatctaaaccttcctcaccaattgatgttgaaactaatatattatatttatttgattggaaattatccataattgattgttgaattgattgtttcataccagtttgatgaatttctttggatgattcatatgaattagatttacgtaaagaagttgatgatataggtttcgacattgatgtactatttttagatgcagattgtccaataaagatatgaggtgaagcatttggtattgattgtaatattttaacaatttctaatgctgaatctctcagttctgtaaatattataattttcgaattttccggtgattcatttaaaaattctttaacattatcatataattctttaaatttcatatgagggaattcaaattcatttgattcaatatagtttagaattttatcaatattaggatgattgaaaaaattaatttgttgtttatcctttgattttttcaatttaaaagttttaattttttccttaaggtatttatggaaattatttataccataaattgttaatcttttaattaattgacctataagggataatattttcaaaattgaataatttgaccattttaaatgttgtggaattgaattatctttggaaattctattttgaatttctaatattataaatgaattaattttatttggatcagtatttaaataaattttacgatcatttgcaatttttaatataggtattgaaatttcattaagtaatttaaaaatttcttcaatttcatcattattaggacaatcaattttcaaaatttcacgttgattagtatattttataatatcatcatcttcaagtgtacgtaattgtaatgattcaatatttaaattattaataattgattgaatattagggagatttgaaccaggagttgcagttaatgctaaaacacgaaatttatgttgtgaattagaattttcattcatataattaattattgaagaataagcataatttggagatgatgatttatgagcttcatcaaatactatacaaataattgaattagggtttaataaattatttttcaaatcattatcaattatttgaggtgttgcaaaataaatacgtttatttgaattattataagtttctaatctcttatttttatgtttatcaagtaaaagatctatgtattttatattaatatttgaaacttttataaaagatttaaattgttgagtaactaaaggtttagttggtgccataaatataattttcatatcagaagttgtccaattaaaataatttaatataagagttgttgaaataaaagttttacccataccagttggaattgcacataaaacattttgttggattgtatttaagaggatattatattgataatctcttagtgggagattaatagggtatattagagttgatatagtatcattattaatcataatatgtgtggtataaggatatgacaactatatatacaagccttgaatcatgaaaaacatgacataatataaaaaatcaataatattaatattgttattgttattttatgattatctcttctttctgtatcagtaatatactacatacaatggcattacatccaactatatctaccggtagaggaggtatgggtaatatgacacaagataaaaatgaagttaatgaagcaaatgaagttgtaatggaagaatcaagtgaagttttacatcatggtagtgaaatgagtaatacagttagtataggtagaggtggtatgggtaatatatataataaaaaggagaaagagaagggtagtaacatagatgatacacaagatattaaaccaactataagtccagtattttcaacgggtagaggaggtataggtaatattaatagtaatggtgaaagggatagacgtaatagtcataataatggtaatgataataatggaataataaaacgttttaagagtttatttaaatagctatataggaagtatataattaatgatgatgatcccaaggatgttcgatacctacccaatgtttccaatcatgttttgctctataaaacatccaaaaccacatagttgcaccaagtgcagtagcagtataacgataaaatggaccagcaataggtttaggagctccagagtgacgaacgtacattgccaatagaagagaagagggtagtatataatacttaatagagaacctcccctcagtaaatgctcagcgtttttcagctttttaatttcctcactatttgaacagagtggcaaatcaggctcatcatttataggatacacttcttcttctttattactctatgtaatgcagtataatcgtccaagagctcatactctacccccctcaattagtcatgatctattgcctgaatctgcaattaaattatctcattcaaatttaccaacagattctctactaatttcaaatatacccccttctccaacaatttcaaattcaactgcttttacaactttattggctaatttcggtactttacgtggtgtttattcagttatttcatcatctgattcaaatcttgttataattgctagatttgcatcaattgcttcttcaattaatgccgcaactactcttaataattctcaactttatccaggttataattgtattataggttatattcatatcttaaacattaatcttaatatcaatcctattaaccttccattacctattactccaccaccactaccactaccatcactacagacaaataatatacaaaataatataccaaatctccccccacttgaacaaatattaccaatttttaataaaattactaaccttatagtaagtgatgaatgtataacaccaatatttaaatcaactttaaattcttcacttaatttcactcattctacaaatttaggttctcctcctcaatcatcatcatctaatacaatttcaacaatttttttaagagatttaaaacgtaaaattgataataatacattaacaaatattacaatcaaatgaaattttatcccttttaagtgataaaaatcaattatcaattctttcaaatgatcatttaggtaatacaattattcaatatttaattcaaaattcaaatcctttcactttagatataattattaattcaatttcaccatttttacaacaaatttcaattcataaaaatggtacttgggttgcacaaaaattaattaattcaattaataataaaagacaaatgaaattaataactaattcaattaaaccttatattcatttattatttaatgatacttatgcaaattactgttattcatggtttattaaaatttaattatccatttaatacaataatttttcaaagtttattatcaaaatttaatataatttcaattaatagatttggttcaagagcaattagaacttgtttagaaactaattatcaaccaaatattgataatcctttaaatgattgttgtttattaattataattgcaattttatcttggagttttaatttaattattgatattaatggttcattattaattaattggttattagattgtgatttaataattgatagatattattatttatcttatatattagttaatgatgaattatattcaattaataataaatttattacaatttgtaataataaattaggtactttaacattattaaaattattaaattataaaaatgattcaagaataattgatttattattaaataaaattatgaataatttaaatgaaattataaataatggtaataataataataataatattagtataaattttattcatagaataattcatttacaacatattgaaccaaatttgaaaaatcaatttttaaataaattaaaatcttatcttttaacaattgaaattaattcaaattctcttaaaagattagctgatgattgtggtattataactaattcaaatattaatattaatagtattaataataatattaattcaaatagattaagaagtaattcagatttaaatgtttataataatatgaatataatgggattgaataataataataatatgaatagtatgatgaacattaataatatgaatggtataaattcaatgaatacaatgataaataataataataacacactaagatcaaggactaattcattattttcatattcaactgatagatcatttgatgaattagaaattgataaaaatattttagaaacattaaatagtttaggtttataaagaaaacaatgtatataaataataatgatataaataatgatataacgattactgattactgattataaactcattgaaactaataattgtaaagttttcaaagcttcaaatttaacatttgcatttggtgaattcattaatgccataattttatttttaaaacctaattgtaaaattttatctaacattgaattatcagttttaattaacattgaaatatcataacaaacaattgattgattttgaaatttatcatccgtattaatattatcactttcaattaataataataatttttttaaaattttaaaattattttccttaaattttgataaattatcaatccaaaaatttaaatttttatgacaaggtgaccaaattaatttcattgaattaatttcattatcatattcatcaaaatttgttaataaattgacggaattttgtaaaatttcaagtaaattaattaaatcatcctttaaatcattatctgaccatttccttaaatttaaatttttaataatttctaatccattaaataataatatttttttaattaatttattatcattatttgaaaaattaataaaatttaataaagttgaaattgataatctaacaattttttccttaattgcatcatttgaataatttaataaaattggaattaattgattaaattgattatcattaattaatattaattttataaaatttttattaaatgataaacaccaaataatataaattattaaatatttcatttgtaattcaattgatttattaattaatatattataaaatgatttaaataatgtaatatcattgactatatttaaagtaaatttatcacgaattgatttattaattaataattcttttaataattgtaatccaataaattgattttgagtatttgaaactaataataaattaatataattaattaataatgattcatcaattaaaccattaaaatcaattttataagttattaatgcatgtgcacttaatgttgaaatatttgaaggtgttgttaataatttaataagtaaattaataaatgtatcatcatcattgaatatacatttagtgaaaattgaatcattaattgatgttgatataccatcataaataattgttaaaatatattcaattattaaattactattagttattgattgatcattattattaacaatatttataagtgaatttttcaaaatttttgcattattagaaggatttgataaaataattgaaattctattacttgttgattttgttgataatgattttaataaattaattgaatttttatctattatattattaattgataatgaatctaatgatatatcaagtgtacgtaaggattcgattgtattagaatctaatgtaaacatttccaatggttgtttaaagaatgaatgatatgataagatacagtaaatattattgtaatctgttataaagcagccaaatttgaaatgaaaatttcaacaaaactgaaatcgacgcaatcgacccaaccaaccaatcgacgcgactatcacacttgaaatggagattgcttacttaatacaataacacaatgactatgagatatataaccacgtactttaccactattaatcatttgactaatataacattcagttgaagttataggttcattattaacattggcaatgatactaattggtattatatgtttaggataattcatactgattttttgcaaattattaattctaattggattaattaattgtttgtataatgataataaatgaattttatttaaccattgagcattataatttattaatgatttaaataatttaacattatgtgatttaattgcattaaataatggttttaatggaatatagtattggatatttctcccaaattaaatcatttggtaatttattattaattaaatattctaatggtaaaagataaaccaatattttccaattaatatatccaatattattgaataatgtataagctttctgatatttgccctcccttatacaaactctaccatattgataagataattgacccattggttgacaaattgattcaattactaaaataacggctcgtgctgcactaactctattatttgataaatgatgatgaattaattttgatgcaatattttgaatcttatcaatatttaattcttcatcttcttgaatttgtaatgattccttaagttgtctctgtaatgtaattgtatcgttcattgccttaaagaaagatgtaatgtcttaaagaatgtacttaaatatcgacgcatcgtcaaaatagggaattttttttaaaatttttcagttttccattttcatgatttatttcaatgaaagatgtatgtatgtatagattcattaacatgttcttcttaaagaattacttattttacaagacaaacgaccttattatacaaccatgtcattagttaatatttgtagatcaaacaatgatccattttatcgttataaaatgccattaattcaagcaaaatctgaaggtagtggtaatggtattaaaacaaatattttaaatttagttgatgttgcaactgcacttgcaagacctccaacttatgttttaaaatattttggttttgaattaggtgctcaaacaacaattgataataaaaatgaacgttatttaattaatggtgttcatggaattaatcaattacaagattgtttagatggatttattgataaatttgttttatgtttacaatgtaaaaatcctgaaactgttttagaaattgttggtaatggtaatttacaaagagattgtaaagcatgtggtaaaattactcaagttaatccatcatataaattagtttcatatattttgaaaaatcctccatcttctaaaaatgataaaaaatcttctaaaaaaggtaaaactgcaagtgaaaatgttattggaggtggtaaatcaatttcagatattgctaataaacaaaagaaatctaatagtgttaataatgaaaatattactacaccaacaccaagtaaattaattgaagaagattggtcagttgatatgagtgaagaagcaattaagaaaagagcattagaattagagaaattaaatttaaatgaatcaaataaggaatatattgaatttggtgaatggatattaaatactcaacctaatgatattgaaatttataaaaaattagttacattgaaaattacacaagatcgtaaatcagttgaagttttagctcaaacaatttttaataatgaaattattaatcaaattataaatcataaaggtttattattaaaattaattacaaatgaaaaattagagaaatcattattaggtggtatagagagattaattggtattaaatatcctgaattaattacattcaataccaaaaattttaatgattttatatgataatgatattgtatcagaggaaattattagagattgggcaactcatgtatctaaaaaatatttagataaggaacaaagtagaaatgttagaaaagctgcaagaccattccttaaatggttagatgaagcagatgaagagagtgatgatgatgatgatgatgaagagtcagatgaagagtagatgataagatagtatataaatagtgattatgtaatgaaatactagtttccctctaaaataaaatttttttgacacattttccacggctctgctaattgcagtagttccgccgtttgtttatcggttattctttgcacatatccgatctcttatctacatgatttattttatttaaagctgtctacttttccactttccacaacttatttctttctttcctttcttttctcttttttctacaatgatcaaacactaaatggagtcttcattatcttctatagaatcatcatcttcaattgaagatctagatccctcaccaataaataataataatattattaacaataatatcatcactagaacttcaacaattatctcaaatatcattgaagataataaatttgctaaatctcaaactgtaccttccccctcatttaattataatgaagaaatagaggaaccagaaatttcaaataaagaaacacccactgatgttaaagatgatggtcattataataaatttgatattgataataaaccccccgataaaggtttttgggcttggactgcagctatttgtgttatgtgtattaatactttagttggggggttaatgcttgttttggtgtttatttaaattattatgttacaactaattatttccccggtgcaacaatggaagattatgtaatgattggtggtttaggtcttggtttatcattttctctttgtgcaattacaaatggtctttgtagaagatttaattataaaattataatgttaattggtaccattatttcattcatttcttattggttagcatctatttcaaaaactgttgttcaattaattatgtttcaaggtttcttaatgtcaattggttgggctttagttgcaggttcaactttcgttattttaccttcatggttcttaaagaaacgttcaattgctcaaggtattgcaactgctggtggtggtttagctggtgtcattttttcaagacctattgattcaattattcaattatatcttaatgacccaaaatatgaaaataataaacatgaaggtttaaaattaggtattgcttgggctttacgtatggaagcctttgtttgtggatttattctattaatttcaattcttttattaagaacttatcgtccaattaaggatgattcattaaagggtaaaggtttaaaagaatttttccttgaattaattcaattcataacaagattagatcttattaaacaagtaccaattttttgtcttattctttggaatatggtttatggtttagcatatacaattttattattctcattatcttcatttgcttcaagtattggattatcttataagcaaggttcaaatgttacaattgttcaaagtgttgctcaaactgttggtagaccaatgttaggtattatttctgaaaaattagggagagttaatacaacaattatagcaacaattttaataactattttcgttttcttttattggattttcgttgaaacttatagtcaattattaggatttgcatttgttattggatttttccttggtgttaattgggttaattttggtccaatgactgcagatgttgtaggtggtggtgggaaagatttaaatcatgcaatttcaattcaaatgtttatgggtggtttacctttattaattgctgaattagttggatttaaattaagaagacctgaaatgtcaaaacctttcctttattgtcaattattagttggtattgctgcaattataagtgctttattattattaccttttagagaatggaaaattaaacgtattttagtagcaagaagaaaaattttaaatgataaattccaaaatgatgataatgatataattacagatccaaacctacatgaaaatgaaattaaaagattagattatatgttacaaaataacacaacctcttatattattagaatgttttatccaatagctgtataaaataccctccattattattttatattattctttcattgatacataaatagatagattatcctatattatataataattacttaatttattcatccatactttcatcatcatcttctacatcttctacatcattaacaccttgaaataatctattaggttcattaggtatattagctaattgtcgactctcatcaacatcaacacctccattccctccattcattcgtacaatttcagctcgtcttctacccattaaattatttctcattgtctcaaatctaccaattactgcaacattactaggtaatccttcaactccttcataaactgctaatgttgatccattattattactcattatttcatttgcaactataacacctgttccattaactaccgttcctccattaggtatcgtcctaacttcatttaatctacgacgttcaatttcttgttgttgtctaattaaattatccctagctctatttcttaatctaacccttgcaggtctatcatgcattaattggaaaaatctttgaactcttgttgcctgtgtttgttgaatacctccaaatatacatcttgcaaataattgcattgtttcaattgaaattgctaaatcattataatcacttaaaaaatccattgcagttgcaacaaaatgattaaatctttcaattgattgaggattttgaaaattttcaatattagttggtgttgttgttccaattataccattaataatttgtaaaatttcagttgcttccctatcttcaacttcagttgtttgaattatatgacttaaatgatttttcaataatttaactccatcaccactgaaaacacaaaatatagatttttgatgaggattaaattcacttggtggttccctacaaaattgtgttatatcaggtcttaaaaattgtgaaatacctgttaatgaaatatgagttaattttggacatgcctttaataatttataaattggataaattgttaaattaacacaataacttaaatgaattctttcaagtgtatcttgactatttttagcattatcagctaatgcaattataccttcatcagttatttgattacatttaactaaaccaattcttcttaattttggtaaatttgataattcaacaattgtttcatttgttaattgattacaacatgctaaatcaatatattgtaatctataacaacctttaatcagttctttagctccaatatcagttatattactacaatgacctaaatgaatatattgtaaattttttcctaatgttgcaattgcctttaatgataaatcagttattgatgaacattttgataaaacaacatttcttaattttggagctaatttaacaaattttataattgatttatcagttatatttgaacattgagtaaaatctaaaattctcaatttatctaatgataaaattgatccattaaatgaattttctaaacattcataatttatattttgatttttagaaattttaaattcttttaaattatctaattcagaaaatattttaaataatgcattatttgaaattttttcacaaccatgaatatctaattcaactaaattttgacaattttcaactaataaatttataacttcatcatcaatactattacaatcacttaatttaactcttttcagtaatggacaacttaaaactaattgacatactgctccttttgaaatattcattgaacctggtgcatataaaccttgtaacctcttacaatgttttgataattgaaaataaatttcatcttgtaaatttgttacaccagttaaatcaattgattgtaatcttttacaattttctaataaattagaaattgaatttgaagtaattttagaacaattaactaatgtaattctctctaaattcatacaaccaacaaataaattaaggaaatcatcattaactaaacctggtataagtgataaatttaatcttttaataaatttcctataattccaaatagttgttttagaatctaatttcattgttttctctaatttattgaaaatatttctattattaatacctggtctaaaccaaatcattgaaataattaaatcagcccaatatttacaagttaaagcaattgataataaatcttttttagaatgaacataagcaaaaattaaacataacatttcaggtggtaaaacagatattgcaccaccaactttagttgaataatcacttaataaagatattctttgtaatgaaattgaattagttctagctcttgtacgtaatatttgacttcttgcatgttgttcatcatcagtatctggatcattttccatatcaattgtattatcaccgatgttgttattattaattatacgattattatcattttcctcatcatcatcttcttcatcatcattatcgttatcattattagtatcaatatttgaatccatatcaatatccgtattttcccttgacataaatcgattattactaattattctaatattggaattagccaatgaagattcggatgatatactattagtttcagctaataaacctccagtatcattatgatttaaatttccatttccattcccattcccattcccactaccattaataatatgattatttaaactaatattcccattgccattaatgtcaatattaatattaatattaccaatatctcgtgcctccataattttggaatatatctaatctaatctaatctaatctaatctattaaatcacctattacacaaactctacaaaaagaaatacggttatcttaaatacgaaaataccaattcatctgaaatctgaaatctgatacaaaaattacttttttgccccccgcgtaatcccatagtaaccttataatgtattacgtaaggtctttatttctatttctatttctctggtaagttcttaacatattcaatacttgtcaaaccgtctcttctgaactcttcaatcatttcattagccttctcccttacaatggctattgcctgtaattcttgacattgtaaccattccttaacagtcatctgtaattgttcatctggtatactaccactgaattctgttaataatccatctaaatcatctccaagtaattcatatcgtgaatcaattacttctttaacatatcctgctgcttccctgatatctgaataaaattcattgtatttcttaacatcaatattcttccatttatgtttattacttttattttcgttaaaatctatttctcgaattttattatccttatatggggtactttgattatccatcatttcaatatcttggaaattaataatttcattctcttccttttccttttcttcagttttgttaactaaattttgtaaatgttcaaatgataatgctttattttcaatttcaacttcaactgatgttgataatcttgcattttttctcattaatgtaggtgatatatcactattgtttgtatcatttttattacttttattaaggctaatatcattattattcatattattattttcaatggtaacatccttaaaattatcactctgatccatttgtgttggaatttcactaacttcacttaattgaatatcttgttgaacatttggacttgaatttgcaataattttagattttttttccttttcctcttcctctttttccttcttttccttttcaatctcctcatttctaattctttctcttctcatctcttcacgtcttattagctcttgtttcattgcctcaattttttcatcctcttttctacgttcttcttcaagtttcctttgttcttcaattctaattttctctattttctttctttcaaattcttctttttctttttgtttcctatgttcttcagcttttctcaattcttctcttctaagttcttcctttctaatctcttcccttcttagttcttctttccttatttcttccctccttatttcttccttcctgagttcttctttccttatttcttcttttcttatttcttctcttctcaattcttcccttctcaactcctctttcctaatttcttctcttctcaattcttcccgcttcatctcctcaaccttctcaatttctttcagttgatcctctttcccctcctcttcatcatctttcttttcactagttaatgaattaatatttaatgataataaactatcatcattatttttctctaatttaactttaattaattttttctttgatttcttattattaattaataatggatcattctctaattcttctgatattttacgttttttcctctttttcttatctttggtgtctttaccatctttacgttttttattttttttcttttcttttggggtatctattttttcctttttaattattatattagaaatatttgaattttcaatgggtgtttgattttctttatcttgttcgttattctctttaatatcatcttccacattattttgttcagttttagaaatttgactatttgcaatttcctctatattatccttaacattattattttttgttaataattcaatttgcattttaagtaatttaagttcattctctaattgttcaacacgtttaatttcattttgtttatctatccctgttgaatctaattgattattttcaattgtatgaattcttgaacgaatatttggtgttgaatttggcattggaggtataataggcttgtcatttataataggtttgtcatgttctataggtttgtcatgttctataggtttgtcatgttctatatgttcatcatgttctatatgtttgtcatgttctatatgttcatcatgttctatatgttcatcatgttctatatgtttgtcatgttctatatgttcatcatgttctatatgttcatcatgttctatagattcatcatttataatatcattcctaactggttcaatatcattattacctatatccatatcatcaattgtaggtatattatcattcattggaggttcataatccataatatcttctcctccttcatcatcatcatcatcattaataatttcattccttaaatcatcactaatttcttcaataattggctcagtattaataattatattcatcttctctttctctaattctctacgttttctattatttgcaaaatatgatgaaccaatattattttcactatcaatatctaattcagtgaaaaattgacttaattctgatgatttaatacttggtataatacgtttattattaatattttcattttcatcattctcatcattcttttcatctcttattgctttagaattagataaatattcttcaatttcatcaggttcaactatttcaattggtaaatcagttgttgtatttgttaatgatataactgaatgatcaatatcatgtatttcattaccatattcaggtagttcctgatcatgatcatattcctctatttgaggcatttccatttccatttccatttccatttctattttcttttgttgattaaatacccaacaattaggattcgaattataatgagcatcatttggtatatcatcattttcccattcaattaaatttaatccacaatacatacaaataactctatcatcattatcattttcaggatcataatacatacccgttcgtatcatatcattaatattaggatattcatgattccaattattattatggaaagttttcaatctataatctaaaccaatagggttattaatatcaccgaaaattaaatcattttgccaatccaatgtctctttatcaattattttattcctaaatttccaaatttgagcataaatacatttactattatttgataaatgataatcaattatatcaatattaattggaactggatgattaattaattcattacaacatgaacaagttattgaatattttaatttaattgattgaggtgtataataaaatcctaattgggataaccattgaggagtatgaatatgaactaattccattcctaagggtcgtaaatttaatggaattaaatttgcaggtgatgttgttttataagatattggctcatcattaaacatatgagaaattttaaaagtatctaatcttgaggagtaagaaattggatgttgcggtgaatcagttgatacattcctatcataatgtctagacatagtactctatactatacacacactgttctacagctgtctacaaagaactaatcgaaaagatataagtaatatataataaacaaacacgtaaaagaaatgaaaatatttcatcttctaaatgcttacataacacaccaaaagccattatcagctattgaaacctcttcttcctctttaacagcatctctccatggacgtatcataggtaggaatatcctctgttggaaattatgccagccattatcacctgtaagtttatcaacaaactcttccttagtaataactccagtcttacattggaaatcattatttgccataataattgcagtttttttactctttacactattacttttaacacatgggaaactattccaggcattatttgcataagtataaacaaattgtaaaattctattccaatgaatatcaaatgtttccttatctaatacatcactaacaacacgtgcaatgacaattgtaccaggatagaaaaattgacaaataaatgcacttgtttcagtatttgttaaattatccttaattgtaataccacaattatcataaagaaatgattttttttcattcatatcattggttaaatgagtatcaatgtataattgtcctctcttaacaaatgatgggaaagtagttgtttcaggtgcacaattttgatatttattatcattaataactttaaatgcattcttaccctctgtaatagtatgtgaatcttgggatgaaattaataattctgtaccatcatccctaagtataaatggttcatattgaatctcactttgatgaattgctaaccattctaaatccctacatggtttaaatccaaatctagtataaaattcaccaacaatactatataatgtccaattaacattaccattattacgaattttaattggtaattgattattaatatattcaattgaacttccattagtaattgattcacctatttcaaattcactactttcattattaacaccttcataatgattaataacccaactaattaatttagaaactaatcctttctttctatacttatcattagtagaaactaaactaatacctaaattcattgtatttgcatgataacctttcctagtgaaaacaacacatgaagatgcaagttctccatcatgtaacagataaaaatattgacctggtgatgatttatctaagaaacaaagtaattcactatcaacgaaatcatcaataccatcaggacctgtaaatgaacttgcacagattttgaaaaatcctctaagtttactaaccaattcctcagtatgttctacctgattattgatctgatgtaatgtatattctgccattggcagaagaagaaagtattcaataagtaaattaattaacaacatggaaagttggaaaatcttgaaatttcatttttcttaaccttatattataactttactgcttactaacacttgttttcttttaataatatacaatatacaataaacaatacaataatgaacatcccacagaaaccaccatcattaccaaataaatctacatccccatctcaatcaaatatacccattagaggtaatttaccacctgtaccaaatttacctccagtacctcaattatcacaatcatcacaatcacaaaatatttcaacttcaaattcaactccaattccaactcctcaattacctaaagtacctaataataataataataatatgtcaatgaatatgcccatgatgccaaatattccaatgatgccaaatatgaatatgcccatgatgccaaatatgaatatgccaatgggtatgatgaatatgggtatcccaccaaatatgcaaataccaatgaatatgccaatgggtatgcctaatatacctccaataccaaatatgatttcaaatataccattacctataataccaatagtaccgaataatacttcaaataatataaatataaatacaaatataaataccaatataaatacaaattcaacaattaatgatccaaataatttatcaaattatgatcctgcaattgtattaaaacaaaatcatttaattcaacaagttaaaaataaatcaaagaatagaatacatttttcatttgaaaattttcttaataaagaatttaaatttggtttagatcctgataggccaatttgtgaatattggattcaatcaaattatacatcatgtccacttaatgatgaatgccctttaaaacatccatcaaaaggttttaaaaataaaattgtttgtaaatattggttaagaggattatgtaaaatgggtgataattgtgattttttacatgaatataatttatctaaaatgccagaatgtgcatattatgcagctaatggtgtatgttctcaaagtcctgaatgtatttatttacatgttgatccaaagagtaaaatacctgaatgttggaattatacaaatatgggattttgtcctgatggtccaaaatgttcaaaaagacatattagaagaaatatttgtgaaaattatttaacaggattttgtccaaagggtaaagattgtaatgattcacatccaaaatttaaattaactttattaaatggtagatttaaaattataagtgatgaagaaatattgaaaaagagattaaaggataaggaagattatgatgcaaagatgagattagagagagatttaagagagagacaaaggcaagataataatgatattaaaaatattccacaacaattaatagagacaccatctgttgatattgagatgaagacagaaacagaggtagatgatgaggatcaatatgatccagctatgtaatgtaataagatttatctaatgtacactatataatttaatttaatttaatttaatttccatactttatttaaaaatcataatcattttcctcttttaaagtaaatcccataccaaataatgcaaaacttaaataaactaaaaatccacctgttaaactaagtaagaaactaccagttggaattaattcacatctccaaaatacaattggtaaaaaagtaccacttgaaactaacataccagttaaaaatttcattaatgattggaaagttaaaattggatcataatcatcaatatctgaatatcccatattgttattattataataattattatttgattgtaatatacaagttgttaaagaatttggtattggagcaattaagaaaactaaaataacatataatggataataagtattatataatgcacatgataaaactatattaagaaatcctaatgcaagtatcaatgataatagaaatagaatagataatgaagatgatttcatcatgttatatgatgtcaatggtgaaaagaagaaagtgttgattaataacagaatcaattacagtgcgtttttcatgtcatgtcattaaatccctatagaagtacttatttagcaatattctttttatataatttccttaatgatctcatatcaggtggtggagttatatttaattctctacgtaattcattaacatctttatccattattttctcccaataaacattaattaaattttttttacaatgataagcagttttcaatgcccatggataataaattttaaataatctctctctttcaatttgtttctttacattccaaggagcaaatattgaacctaaacctgcaaatggtataccaatatttaaatattcgaaaaattttaatgcaatttcaccttctctgaaaattggtaatccaattaatgcatgataaaaatcatgacattgtctatacctttggaaaacaaatgctaattcttcatcatcaataaatttaacatcaactcttgtatcaggtgaacaattttctcttataagccaattataataacatttaccaaatgaattttcaggatatgtctttaatttttctaaattaagtacacttgatgttatataaggtctatcttttaaaatttctcttccaattgaatcatttaacatattatctcttaaattagttaaaaaattagtagttgcagttgattcacctaatgtaacaataaattcatttctttcaggatgtaaaaatgcaccaattgatgatccaataaacattaatattttttcataagtataggtaggtatatgattttcatataattttggaggtctcttaaaaaatttacgagttgataatttttctaattcaatttcatttttagatttatttgaatgtaattcattattttcaattttatttgcaagtgttgttgattgataaattgaactatatgcaattgtacttaatgataataataaaggttttataaaattacgtttttgaataattgtacgtatgttagtattaatattattaatattattaatattactatatttattcattagttttgttattactttaccaacaaaaagaattaaaaagcaattaatcttactttaaataatttataaactaccttcttcttaacttaaagaatggtgagattataatgaaaataatattaataaaaaaaagtagaaaaaaataaattatttaaatgatcgaacccaggatcgaactggggacgttatgcgtgttaagcatatgccataaccaactagaccatccgaccacttagttgttgttttaattctgaggtttgccctgtaatggaggtttgtgtagaagtcacgtgaggttattaaaattattaaataaaaacttgtaataattacaattcataaaaaaattaaacaaatcattttactacatgtattgtaataatgcaagaactatttcctctattaataatttagaaaataaaaaagactcgcttacgtaacaatcgacaagttttctctaacaaactttggcaaattagaaattacatcagaaagtcaaaatataaagaatgcatcactttataaagtaaagaaaagatatataccacacacaatgggtaataaaagatatgcagatttcgatgatataacccctaagagacaaagatttgggattgattattatgatatttataatatacgtaccccaagagaaattttcaataataatagatttaaattattaattaatgaatcaacatctaatgataatcaattaattaaaattataccatcatttggactttgtttagaaacagtttcaatgtttattaggaaagatattaaattatctaaaccaagatcaaaattatctgatttattaccaattatttattatcaatcattaataatgtttatacgttatatttatgttgttcattcaactaatcctaatttaattacttcatcatttttgaaaactgttaaagaatttaaacttgatgaagcaattgtacatccatcattattaccatggcttgaaggtttaggtatttatgatattaataaaaatgatagaattttaccaattttaccaaatgattttgttaatgatgatgcaaatacaattgaaggattattctcatttactcattggggtcatttccctaattttaaacatatgatatttttaatggctcatacacgtagaaatgatcctcatacagttttaaaaccaatttctaatgttttaacaggtaataatgattcaaattctttagttaattcaattttaaatagaaatttaataccaggtttaagatttttaacttataataataatgatccaattttacaagaaattgcatttaatttattaaataaagataaaacttttaaatctaataatatacttaatgaattaacatttttagatcctgaattaattgaatattgttttgaaataactaaaatattagatgatacattcccattcaaaagatataatccaatgagttcattaaaaggatcatttttaatggaacatagtttaacaattttatcaaatgatccaataaataaaccttggaaacctaaattacatgaaattgaaattgataattatataacaactatttcatcttcaagatttttgaaaagagaaagattcgttaaggcaaagaataaaataaataatgatgaattaattgatttagttacaactccaataattgttaattatgaggaaggttcatatccttcaagatatattttaaataataataataaagttataaaaattgaaactgatataccaataaatgatgattattataatgaaggagttactcatatatcattccctatcaaagaggaagaagttactatttaaaaaagttatataactaatcactataatcattatcactatcataatctcttttatttaacgaaaatactttacttatataatcatttaatttatattcacttaatgatttaatatctgatggatcatcaagtaatccatttaatcctactttaatattaatttgttgtccattattataaaataccaaacttggtaatgtcttaattttcaatttatcaacaataaatgaaacctgttaaagcattaacaataattacattaaataatccattatttttcaatataatttccttaattaaattaacaagtaattgacaagaaataaaattttcattaataaatatcaataattgattaccaaatttaatcttctttgacattaattcaattaattcatcatttgttgaaacttcactataataattacttaaattattatttctccttataatcgaattaagttgatttatcttttcttgtcggtatttatcaaagaacccatccttttcactttccttctctaactcatcaaagatatcatcatcattatcatcatcataatcacttgtcatttccctaccagaagaaagaaatgaaaagaaaagaagctaaatggaaaatcatgtaaccaacgcgtaacagtcactatacccacaacgaccttttcttatcgaataactaatgtcaataacgcagaaacgtataatacgggggaaacgtatcaaaccatcggacgatacagaatatttacagcaattaacaaagaatatcttatcacctaataataaattaaaagatttcccatcattaacatcatcaaataagattgatttatcattatatgcattattttcattattaattaaaaactttataatttcatggtatgttgaatcattaaaactaaataatattgaagaatttataaatgaattaatatttttatttgcacatatttgtagaaatattcaaggtagaattaatgaaaaatttgatagttttattaaattattaattattgatttaccatatgttataaataatcatattgctaaatttaatgaaattgaaaaattgcaagtaattgataataatgaagaatttgttaaaatttttttagataattatggaattgatcatattgatgaatatagattattattaattgaatcaataattaaattattattaccaaatgaaaatacagaatctgaaatttcaaaagatttcataatttcattatttgatggtatcataatgggtaatttaataaagaatttttcacaaaattatgttatttgggaaattattggtaaattatgtgataataatgatgaaaagaaaaaggacacaagtaagagagatttaattaaattatttataattgatgataaatataatgttaaacccaataattggcttcaatttacagatttttcaccaattttacaattaattaatataattacattatgtgataataaattcccactaattatgataataactaaaatttttattcaatggataatggaatttacaataattaagaaatttataaataattttattaaaaaaaatataattgaatctttaaatgatgaaaagataagtaaaataattaatgaattaagacatttaatgttccctaatgatgataaatttgatatgaaaccaagatttataccaaataatgaagatgaattaaatgaaatttttgaaatgaatattataaaaattttaaaatttttaaaaaataaatcaataataaataataatgaagaagaaattagagttaataatttattaaaattatttaaatatcaagaaataaatgaaattttaattcaaaatttaattgatattttaattaaatgtatatttccagaaatataggtcctaattaattgagactctttttatataatgcttccttttcttccagttcctttttcaattcagcttcctcttcttcccaaacttcttgaatttgccacattttagcatattgtccatttaaattaattaattctttatgattaccttcttcaacaacactaccattttttaaaacaataattttatctgcatccattatagttcttaatctatgagcaacccaaattgatgttgtaccttcttttaaaacatccttagagtatttaaaatttcttgttcagtatttgtatctaatgcagatgttgcttcatctaatccaattatttttgaattttttaaaactgctcttgcaatggcaactctttgcttttcaccacctgaaatcattaaacctctctcacctacaattgtatgaacaccatttggtaatgaattaactaaatgatctaatttaactttataaataatttcattaatttcatcatcagttgcatttggtttagcaaatcttaaattttccaataatgaagtattgaaaagtggtgtatcctgtggaaccattgcaatttctttacgaagtgaatctaattgaacattttttatattttgattatcaataagtatagatgagattgccttattattatcactattatcaatatcataaaatctaaataactaattttaaaatagttgatttacctgaacctgaaggaccaacaattgcaactttttgacctgatggtaatagtaaatgaacaattatttaaaatttttctaccttcattataagaaaaattaacattattaaatttaatttcaccattagtaatttcaattggttttgaatttggtaatgatttaattttaattggttcattttgtaatttaaataaagtttccatatctaataaactttgttttaattctctataaacagaaccaaggaaatttaatggtacagataattgaaatactaattgattaattaaaactaaatcaccaacagttaatgaaccattaacaacaccttgacaagccatatacatcattgcagttaaagcagaagtgaaaattaaattttgacctgaattaagaaatgctaatgaagtaccaactttaattgatgaatctctatatttagttaaagcattatcatattttaaagtttgtaaattttcattattaaaaattttaacactttcataattaattaaagaatctaaagcaattgaagcagcttcttgatctgccttattagccttacgacggaaagttgttctccaagtagttgtacgaattgtaaaataagtataagttaacattgttaataaagtaacagcagcaaatgaatgaaccataattataagttaagataccacaaacaacagaaatttcaaaagtaattggaattatatggaaaaccattgcagttaaaacataagaaatacctttagtaccacgttcaatagctcttgttaaaccacctgtttgctttgataaatgataagataaatccatatttaataaatgaataaaagtatttttagcaactgatttaattgtaccttgagcaactgaagcgaaaattgcatttcttaattcaccaaataaaacagcacaaaatcttgataaaccataagctaaaattaaagcaacaatagcaggtggtaacattggtaaattttcagttataattgaagaagaacctactatatttaatgaattccaatcaatattcatttgatcaataattgatttaaagaagaaaggaacttgaacatttaataatttagcagatataagtaaagttaaagcagaaaccactctaaatttaacccaaggttgatcattaggccaaagataagccattaaatttttaattattttaatttgtgaaatatttggtaatgaaggaccattttcaatttttttagaatttgcaattaaatttggtttcacagtagatggagtagatggagtagatggagtaggtggtgatgatgttgtctttgatgaagtgttattattattataattgatgaatgaattagagaagaatcttttattagtgataagagaagaagatgatgatttaagataaatatgggtattatgagatattaaggatatacgaggatgatacaccagtagtttagaagaccacatggtgtgtataagagttgtataaaaggaatattaaaaagaatatcatcatcaatcatcaacaaggtaatatattcatgcatcaagagaaattgaaaaagaaataaaagccgattatatccgaaggcaccgacgcgactgcacgaaggctcattaattaattgatttaattaaaaaaacgcgtaacactttaagaaaaacgcaaatgactcactcagctataaaagagacacaattcgctcttttcattggcaccagatttatttcttgtttccactgcaaaaaggaagttttcctcacttaaggagagagacatggaaaaaattggtattgttgaaggtgaggcagtccccaatgtccctgcagtcgcgtctgtggaggagaaagagtcttctgttgctgctgctactgttgaaccaccagttgtagatagtaataatgataatactactactatcactactccagttccaatgatacctgcacctaaaccaccatctgaacctgatatgaataatttacctacagatccaatgcctttacatcaaaaaaaatatttacttaattccattaaggcaatacgaagattaaaggatgctcaacctttcattaatccagttgatatagttaaattaaatatcccattttattataattatattaaaagaccaatggatttaagtacaattgaaaaaaaattaaatgttaatgcatatgaagatccaattcagttaattgaagattttaaccttatggttgaaaattgttttaaatttaatggtaaagatagtgctatttcttcaatggttaaaaatatactttcaagttttgaaaaacatataaataatttacctccaaaggaattacctgataaaaaatcaacatcttcaaagaaaatttcatcaaaatcaatttcaactcctttaatcagtagtaatggtggtcgtccaaagagagaaattcatcctccaaaaccaaaagatatgccttatgatattagaccaaagaaaaaaaaatatcaacctgaattaagatattgtcaatcaattttaaaagattttatttctaaaaaatatgaaaatatttcttggccctttttagaacctgttgatccaattacaatggattgtccaaattatttcgatataattaaaaatccaatggatttaggtacaattcaaaataaattacataatggtgaatatgaaactgctaatgattttgaaaaagatattagattaatgttttcaaattgttttatatttaatcctgaaggtactgcagttaatatgatgggtcataaattagaaaatatttttaatgaaaaatggtctaaaagacctttaacaccaatttcaccatctcaaagtgataatgataataaaaatgataatgatagtgaatttgaatttgataatgatgaaatggatggtgatggtaataatattaatgataatgaagaatttaatattgatataaattcaattactgatccaacaattgaatttttattatcaagtattgaaagaatgactcaagatttaaaaaaaatgagacaagataaatataatcaattaaagaaagaatggaataaaaaacgtcaacaaaaacgtaaaaatataaataatagaagaaaatcaaatgttagtcaacaacagagcaagacaacaaagaaaagaaaatctaatgaatttgattatgatgatgatgataatgaatttgatgatatgaaaaataataataataataatggtgatgaaaatggtatttatccaaaacatataacttatgaaatgaagaaagaaataagtgaagcaatgcaacatattaatgaaaaaatgttgaaaaatgttataacaattattaaagaaggattaccagatttacaagatgatgatgaaattgaattagaaatggatagtttagataatgccacattatcaagattatatcgttatttagtttcaagtaagagaaaagttaaaaaagttaaaaaggatgataatgaagaggaacaaaaaattgaacaattaaagcaaaaattagctcaatttgagaaaaattcaagtcctaatggtaataatggtaataataataataatgatgatagtagtgatgatgatgatagtgatgtatcatcagaggaagaatagatgtgatgtgatgtaatattgtataatttgtcttgttgtatataaaaatgtgtatattagttgtattagaagaaaaaaatatattctcaaaatatttctatcacatgtatatgttacttacttcttttcgatatggagaataagaacttaaccaaactaaacagtagtaataatattgcacgtcgatcatctccattggtacaagagattgatataggtatcgatgatgatactaatgataaaataccaatttacattaatggagatcatgtattaattttcaatttacaagatatgaaaaaattaagtattgaatatggaattgttggacaattatcaggtactttaccattagcaccacaacaaaattcattacttggattcccctggagattaactatttatgaaacattatggttatataataaaggaattgttaaattagtattattaaatgaaaataataaacaattagataagatattaaatgatgaaaattatcaaggggaaatgattaataaattatcaaataaattagataaatggcgtaatgagaaacaaagagagattgaagaacaaatgaagagattaaatataattagaccaaataaaaataaattacatattaaatcattagataatttaaaaatgaagacaaatagttcaagtatgactgatttacaacaagttgttgaagataatcaacgtaaggagaaagcaattaaggatgctaaattagaagagagggagattgaggagagaagtaaaaggaataaaatagtgtttatggaaacacctacatatgatgaatttattgataataataataataataatacagatgaaaaacaattaattgaacaattaataaataaggaaatagaggattgtaccattaatagagatcaattaattaataattatcaaatgtttaaatatttaaaatctaaaggattaatgatgttaccaggtatgagatttggtggtattttcgtttcataccctggtgatccattaagatatcatgcacatcaaataatcaattcattagattattataatgatgatattaatttaaagaagttatgtaatagaggtagattggctacaggtgttaggaaagtatgggttgttggtggtatagtaaaagataaagaagataaagacagtacagagtctatgaaatgtttcagtattgaatgggcgggattttaattttaatttattttcatgttataatttctttttctttttctgtttcttctgtttttcagtttttgctgttttttgtaataaccaactgatcctggtattagaattcaactaatgatggcatcaactacgggttcaactattctagatacccaaaatattaataatgatgggaaatctcataaacgtaatatatccaaatcaagtattgatatggatattgataaatttgaattaatggaaaatttaatattaaataaaattgattcattattaacaaattttgaaaataaattatcaatggaagttggtgaaactgctgcaattataaaatcttatactccaacttatacaagtattgttaatactttaaaatcagttaaatcttacttaaataaaaatcatcaatataatttacatccattatctcaaataattgatgaattcgaatatcatgataatgatcatgacaatgaaccttcaaaatttattaaatcaattcaattacttaacgctcaattaacagattttgaaaaacatcataatttaccatcattaacaactcaccctaatgaacgtttaattgcactgaaggatactttatataattatgatagtgcaatgacaatttcaaattttagacatttaaatttctttgaattaccatttcaatggagagagaataaatttataatttatggttatagatttgctaaatctcatgtttctgcaattacaagtttattttattggcataatgaaactgttaatatttggactcatcttttaggtgcttgttatttattatatttaggtttatttgattacccaaattcaaatacttatcaaatttatggtccatctaaaaatgatcatttaattatgtatttatttattacaagtgcaattatttgtttaatgttttcagttatttggcatagttatactaatattggttatcttaatatacgttcaaaatttgcttgttttgattatagtggaataactatattaattacatcttcaattataacaactgaacatatatcattaaaggattatccctaatatgagattaatgtttgtaatttgttcaataattgcaggtttagtaggtattggtatggcatggcatccatattttgataaacctgaatcaagaattataagaattttattctttgtatcattagcaggtctaggtgttatttcattcctttgttcatgttttgttcataatatttcctacttgtttgaatttatttagtccattattattctcatttggttggtatttatcaggtgtcgttttttatggttcatttttccctgaatgtattagatcagatgttgaaattgataatttccaaatatctgatgaaactataatgaaactggataaatcaaatcaattattaacttatttaagaaaacaaccaaaacatacttgtcattcaaataaattttcatcattatggtggattgattggattggtaattctcataatttatggcatattttcgtcattggtggtgttttaggtcattatcatgcattattagaaatgtttaaacgtgcatatcaatgaaatattaatgatatttatattcttattcccctttcaaatttaacgacttttgttcttgcatgcatttttcattcccatattacattattatttataaactttacatattgttatttatatattgatttattttatttatatatttatacattaaacttgattaaatttcatatcaattggttcagctaatgcatttgttgaataattactatcaaatgtattatattttttaattttcggtactcttgcattattaagttcagttcttaatgatttaccactatttaatgatgtagatttattattatcattttgtttattatattcatctaaattatcaaattgttcattaaaatcttcattaaaatcttcattataattattatcttcttctgcatcaaaagtatcaccaaaatcatcatgatcatcaatcatattatcattcaataatggtgttgcttcattaacattaacaattctaatattatcatcagtattattatttcctaccattaaatccctttattattcttacttgtatcaaatgttaataagaaaaatgtaaccaataaaataacaaacaatgcaccaattaaaattcctaaaaatatagaaaataaaggtaaatgtaaatataatttattatttgatttatttaaccaaattggattaattggacgatcaattaataaaatacctgacaatatttcagtttctggaattgttaaacctttacgtaaaatacgtatctcattcttactaccttcagttatacttaacatcatatcaccagattctaattgacgacatgttaaatgggtattatttaataatgttggaattaatgtacttgttccattttcattataacaattaattatatcatttaatgaacctggtggtaaaatatgtaatttagcaaaattttctaaatatttaatatcactaagtaaatgtgttatattctcttgaaataatgatttagtagttggtaacataattgaatatgaattatcatgaatatatgaggataaatttaatttatccaatatatttaaaaattcattactatcttgaatatttaatagatcggatgtagttatttcaatattatcagggtatattaaattatcattaattggatgaacaacaccattggaatataagatttcatcatcaaatgagatttcaaatgttttatcatcgatttgtaaaactgtgatatcattttctacatcatcatcaattttagaaataattatctcattatctgaatatgtggtacaagttttattaacatcatcaaaatcatgataaattaaactacctttaataataaaattttctaatattaatttaagagaattatcatttttcaacaaataatctaaaactaaatccaaaccattccaaagttttgaagatgggaaaaaaatagtataaacttcatcattaccccttgataaagattttaataatccaaattttttgaaaaattcaattgatttagaatgtccagttaattctgatgctaatgcaatttgtaatttattaggaattgtaatatcatcatctagtatataaattgatgaattacctataatataaggttgtttatttaataattcaatatttgaatttaataaaagtttatcaggatctgatgatgatttttcaagtttaatcttttggcaaaatttttctccatcttcattatagcacagcttagatgtaagtaatttataatttgtatctgttaaattaattgaatcattaccctcaatgaaatgatatttaattctattttgtaaattttcagttatttgataataatcatttgatactaatattgtttgattaattgaattatcatcaattaatgatgataattgtctaaaatcaatttcatcaacaaattcctcatattgtaatccaataagatactttcttggtgtgaaaactgggaaattatcattagttgaataattatatataggatgattgaaataatggattataccatcggataataaataatttgatgatgatgagtgtatttcattattgataattaactcatcaccaagttcagatgatgaaatttccaaaacttcattattcatattagttgtttcaattgttttattgtataaattaccaccaattataccaggtaagataaaatttgataataataaagatttatcatttaatcctctaatattcagtaaatatttcctctcaacgggggtcaaatgaagtgaattatcggaaggtaataagatagttgtatttgagaattgatactattgacatgaattatcactaattaataaactactaaacaatttaaaatgttcattacctgtatttctattaagtgagttcaggaaataagtacaaatagattcctttggatcaattaataaatcatcgatagttaaaacaactgaatcaatagttgataaataggtatcatttgatataacattagcattttcaataaaataaacttctttaattagctcaccattctcatctggttcaatatgatgatctaacaaaatgggtatttgaaacccttctaaaaatggagatccttgattatttaatgttgataatatggaaataccattaatataatctctgaaaattggttcatcaattataaatctatttaattcatccattgacattttactacctctctttatatcatgatttgcaaatgctgaattaattggtgctaggaaagtaacattctctaatgtattaacataatcaatgaggtcactcttttgtaatattgatatgagatcagaaaatgattcatttgatgataaaacatcaattattgacattgtgggtacagttttatcattattagcacatataacacataccaatgttagaaatatcaaaaccagctgcgtgggcaccatgataacagccgatatcgataataaaccaaggaatacagataagaaagggtgtatcaaataaaaggaacaaagccatcccatcgaaatgaatgaaatgagcccttaaaggaaccagcacaaaaaatttgcaaaatgaaaattgcgagaatgaaaattgcgagatgaaatttccgagtgttcattacatgacaattgttttcattttgacttagatattgactatacacaagacttgatattcatttggaaagggatcagttgagtttgcttttgtaagggtatatatatatatacacgtttaggtgcagaagctagggataaaatggacaatacagagaatttaaatgctgatcaagttgcagctgcaacaactgttgaagaaatggaacaattgagggctcatgtatcaattatggaacaagaatctgctaaattacaagaaatgcaagatgaaatgatggctgatgatgatgaaattaattctggtaatgctataattgaaaatggtaatcaagttacaacaaattggtgatgatggtgaaccaattatgggtgatgatgaaattgatggtgaaggtaataaacgtttaacaattgaagagagacaagaaattgataatagatcaatttatgttggtaatattgattatcaagcaacacctgaggaacttcaagaattatttaaatctgctggtacaattaacagaattacaattttaacaaatagaatgactggtgtaccattaggttatggatttgttgaatttgaatcagcagattcaattcctgaagctttgaaacttgatcaatctgattttaagggacgtccattaaaagttatacagaaaagaactaatttaccaggttttggtagaggtggtttcagaggtagaggtagaggcagaggtggtttcagaggtagaggtggttttacaagaggtggtttcagaggtggtagaggtggtggatttagaggtagaggtagaggaagtttcagaggtagaggtggatttagaggtggaagaggtgatggtaacttttcaccatactaaatgcatctatatataatactaatagctttttaattactatatttttcagattttgtttctatttctattttaaaaactaaatacaactatatattgtttaatattacagttttagagtaattagaattaactattataatttaccattattaaccttcttaataacataattagcttctctttcacctgttttccatgcagcatgtgcacatccattaccatcatcaattataccttcacctgcaaatctaacacgtccagtaccatcgaaaatttcctttggatcacataatatttccaatgcatcttcaaaattatcaccaatagtaacaccagtataactaccccttgcaaatggatcattactccaatgactcgtctttatttcaataggatttggaatttcattaattgattttccagaaatacgtgcaaatacaggtttgaaaactttaaaaatagtttcagaatcagattcttcaagaaattgtgttaatggtgatgatgttaatgcaagtataactggtttacctgttggaactgcaagattaacaaataaaatggtataatctaaaccatttggtacactacctttaggaattagtatgtcttccctacttatttcaaatttatatgatgatggaccatttggtaaatcattcttacatgcattgtaaaatttttcatcaactttagcaaatgaatgaaatctatcatcatttaaactccaaaaaatttcaggaaattcaaagaatattttaccaagattggaaaaactaactctctctaatgcatttgttaatttagttggtaatttaggaacccattcaattgaacctttttccctggtattagaaagtttcaaaatacttaatggtgcagtaaatattatattttcacatgtaaatatttgaatattgttaggatttatagtatccttagtgtagactttaatatatttattagtattatcatattcaattctgtaaactgattgattaagttttattgatacttcaccggatttattaacaattttactcttatcatttaataattccttaacatttgaatactttgatgcatcaattaattcatctaattcatccattgaaaacagttgaatacccatttaaaaccaatgcatttctacctttatgaacatcagcggcaatatttcttgaacttaaaatatcccaagaaggaaccaatccataattctaatccacgtactaattgtggaacatgtctaatttgataatctgttaaacaatattttttactttgtaaatattgataaacagcttctctaacacttatatcttgatcaacttttaatttatcataagattctgccatgaaaagttcaatttcttcaaatattggctttaatctactattttcactaattctaccatcttcattaaaataagcttcactaccatcatcaaatgtaaattcagttttaccgtttttccaatatttctctaaaagcggattgtcataacagtcatgaaaccatgatgcacccatatcaattgggaatccactatttaatttatctgtaaataatctaccacctaatctatcccttgcttctagtactaaatttgatatacctgccttagttaaatcttgtgatgctttgaataccggcaataccagcaccaattataatagtatttgtatctgtttttcccattgttagtctaaaagaagttgtattaaatttatttttccagaaagaaaaccgttgtagtttttataatgaaaatgaaaataaattcaaaattcctagataatagaaaattcatgaaacttttccgcgcttaacgttgtgttatcttatcgattaggccaaaagagtaagatcagcttggagtttccattctggtcaatgatgatgatattatgttatttacaataggagaagaacgtatgtttatggtacatattgtactatatcatacgagaataattattttcttacctgttatggtaaagaagtaataaaaataaagcaagtgtttgcaaaaagaattgaaaaaaataattatttaaatgatcgaacccaggatcgaactggggacgttatgcgtgttaagcatatgccataaccaactagaccatccgaccacttagttgttgttttaatgctgaggtttgccctgtaatagaggtttgtgtagaagtcacgtgatatgcataagtttaacaaataagttaaaaaagtatggctattaaatcaatttattacaattttacacacaataaaaatattttaattttgttacccttcaaaaaagacacactacaagaaaaaaacagattgcagcacctgagtttcgcatatggtctcccactacactactcggtcaggctcttagcagcttaactacagttgatcggacgggaaacggtgctttctgctagatatggccgcaaccaaaagtgtataatttctggaggtgttatggatctcaaaatgaaaaaatgtgtttttttctcgggctacagaggtgccgtggatatgagacccagtgcgttagaatgtgtttgtcagagggtatctgtgtaaattttataaaggctaaggaaaaaaagaaagagtgactttttgatttttatgggaggtaagttgagtatttaactgagaataagtgtgttggttggtatagtagttgagtagaagtattttttaaacaacaaaattgggtcttttagatgatattatatgcttaatgtggagatttagtggtgtttattctgaattaaagttatcaaagcaaaagatgcactggttgtaaagaaataaaaaggtaaagttagtaaatttccaatttcaacagtaaatattttgacaactagagtagctagagacatgccttgtagacagttttgatcagcgtattttactctatatgaacagtgtttaacatgaaaatgtttgatgttgaccaaaattaaagttcatctgaggaaggtttcatgggaatgtttaacttgaaatactattggttgaacttgatggtacatattctgtttttgttggaaaatttattgatgatgttgaaacattactacttttcatcagattagtaccactgttaatattattattattatttgaatttttatcataattactgatttattacttgctgtaccactaccactatttgaaacagcaattacttttgcagatctaaaatcagcaaatttaataattcccgtgtaatctaataatatattaccgtgtttagcatctttatgatcaataccaaattgatgcacattgacattatttataaaaaaattttaaagccaaataaataattaataacaaagaaacgagtttaaatttatataaattgtaagaaaaaaatcaaagccaataaaactacatttaaagaaaagtctaatgcaagaaagaaatcatcatataaagaaccaaaagtatccactattataaaaaaaaatgaacaaagactaatccagaacatatccatgaatgtttaataatacttctgaagtttttcttattagtttttaattatttatttattttatttagtttaaataacttttactgttgttaataatgaacgctgcatctagagttagtatattacaacaggttatgggtcaaatctcgactctattccctaaagataacccccccaaagctatctgctgctgttaattatccaaaatgggaaaactatgttggtagaatgttggccactgttggtgcaggcgttgatgtctattttgcttcaggagatttgatgttaactcctgatactactgatgttttaagtgcacaaattcaaggtattctgaccttaattattcaatcaattttgcactgtactgttgctccagctatccttgataagtttgaaacggatgctgctgttggttttgagttacttgtattaattaaaagaagatattcacacatatctgttagagaactttccaatcttattgattctgctgttgatactagaactaagggttcttctcctggtgaagctttggctattttcaaaaatgtttgttatcaatttaacaatactcctgaaataaatcaaatgatggggttattttatctgaaaatgttcaattcaccattagctaaagcaaaagttttagactgtgctgctcctgatttaactttatcagctgttgaagcagcacttgaagattttattccatccgttcctcaaactttcatggttaagaataacaaaaatagaggtaaaaagaacttcaaaagaaacccaaatgaagttacatgtcttagatgtcaaactcctggtcactatgctagagattgtacagctcctgctcctgcttctgcatcagcatcgggtgtctctaaacaaggtgcatcagcatttactactacctcaaatggttttgcctggatggcctccaattctagattacctatatcaagaaaatttttattagatactggttccaatgttcatatttctgtaaacaaagatcaatttgttgaatttgaaacaattggtggttaaatttctggtattgctgaagattctttagaagctaaaggaattggtgaaattaaattagttcatcctactactagtcatgaaattttgttaattgatgttcattatgttcctaatgctactcaaaatattttatctattaagaaagcatctaaacttggtatgtttttattcactgaacacaaaattcaatttattccagatgggtctattgaacgcttacaaatcggttctactgaaggttctttgtatttttaggagttgttgctaaaccttctgcagtcaaataagagttctgatgagtatttttgcaaaaaggaagaaggtttcgtctgaagacaagtttgcagacctaattagaagatttgttatttttattgatgtaactctaataggtacaaggttccccaaaacaaaacaaccaaaccagttaaacggaaaccttgtgaatgatgaaatagatgatgaaataaagaaatatttagtagaagatgctggtaaaatgtttaccttggccaaagaaacaactgataatattatggactctttcaaggaaataatcgatattctgcttcatttgtagacatagttttgcaattcaaagaaacgttggataagtataaaaaaatgaacttgcatgcaaaatgcaaaaagtaaaagtaattttgaaaattgtcttaaccattgttgttgaaagttgagatggattctgcacaatcgttagattacaacaaatacgtaaataatatttaagctgtataacacactctcttaatccaaatttacatcttattatagtctaacaacttgttgagcaggatccatacttacaaaagaacaacaacgattatcattaaaagaaaaagcaatcttactctttattaatttctcttttttttgtttattgcgagcaatatttaattacgtaagcacagcttagaataagataaataaacatatacttatgttctgcattgttttaataagagttaaaaactaatagtaaacatataatgactttttgaaacagtaattagtacttgaactattttacaactgatatcaattaatagaagttatcaaacaccttaaaaaaaacccaaattttcaaacttaattttctcaaccaatttaagttcaatccctttaaaactttgacacatacttaattaacatcttagaatactcttaacatactcaaatgtgccaaaaaacgccttttgcaaaaatttttacctaaaaaactcacttcatcaaaatcctcaaaaactacgtcaacaactaagactggatggccaagttggttaaggcgtgcgactgttaatcgcaagatcgtgagttcaatcctcactctggtcggtttattttttaacttttatttttattaaataatcttataatcatgtcttataactttatcatgataaattaaatattcttttttttatattatattattaaacctttgttataaatacattatataaattaattaaattatttactccaaacttctgtacattttttcaaataatcaccgtattcaggtacctgcccaattattcattacatttgaaaataaatttaaaatttctgtaaattcattattgacactacgttcaacattaatcgataaaaatttaacatcattattaagtaatttaaagcaaggtaataaattatttaattcattattcaataatttaatttcatttattaataattttttagcttcaggtgatcttgaaattgaaattgttgattgattattcatattagaaattgctaaattaatacttggacttgaagattttttattaattggaattggatcaattggatttaattttttaattaaagattttaatttcacttgcttttgtaatattatatttttaaaataaattaattgaagttcctttaatttcctaaaatgtaacatttgaagcatataagaaattgaatttttaataattattaaaggttccttaaataatataattaaattattaattaaaacttcaatattaagaaaatttaaatcaattttattaccgaaattttcaatattaatattttgattctctaaaatactgaaaatatttaaaaatccacctaattctaccatattaccacgtaatccattaagacaatgaattatatcctttatcttagattctaaattaattgaaattttatgaattattttcaatatattttctaaatttttgaaaacttcatcatttaattcattttgaaatttttttaataaatttaatggtggtattggtataaatgaaaaatatggtgaaggttttgttggattttgtgtttgaattaataataatgaatttgttgaaagatttgtaaatggtggtgaattaagaactgataaccaattatctatataaggatcaataaatttacaccaaatatctgaaattgacagtttcttattaatttataattctcttaataaaataatttaataatctaattcgtaattcaattattgatatatcattcttataatggaaaggatttttaaaaaatcttgaaattgaatgtttctcaggtattggaggtataaacaaatatggataaaatttacatagataatttcttaatgatttaaaatcattatacctacgtaaaacatgtgtattattattagtattttgaattttataataaactgtatcttttataatttcgaatgttgtaattgatatattcgttatttcagtagcagtagtagtagtatcttcctcaattgcagttatatttgtattatcaatgtcatcattatcattaccatcattatcatcatcactttcactatcattatcacgctcactttcacttccattattttcatctatactccttataccacttgaaaagcaatgatttgaaccagcaaatggattattatctactgaaaaatccatatcatcatcactatattccatagtgtccaataatgtgttaattgcagttagaaatgtcttgtccaaaagcaaaaacatacactatcaaccgtactatacataataaatgataattttggacatgtatagtataaagtgtgattacctaatatttccatgttatcgttatcttacctctttatctttaaaagctataaaatgtctatctacacaatgtctatactactaaacaatacaaatatcccattcgtatttgttgatgatgttttgccacatatcaaaggaaactccattggggttcaatctccaaaattcttgaagaacaatccatatttgtgataaactacgacgtgatgaaattagtgaattatcctgttgttgagtcattgatttataaaatcctcttatcatcactctatccctttcctcacatacattagctcctagtataagtaatgggaataatagatgactatgaaagtttgggtataataataaagttctaaattttccaaataataaaagtacaagattcttaatttcataactagttgctggtaattcctttatcttaaacttcatatataatagtaccgtcattttcattaaatcgaaataagcaacatgtttggaaatcaggtggtgtgttttcatttgaattcatttgacttgctttgattctttgttcaagtaaatatgtcttatcttgaacccagtaatggaaatcagatcggaatttctcataatctaagtataatttagtattgacaaagttaatttgatcatcaggatcagtaatgttatccagtataggtttaatttcattgtaatatctatcaataactctctgtatcctgacagagaactgatcatataagtgcattaacctcacctagatacaacatagagattcagacaaacttgaaagtataccagaattactattcacttgagtgagttgcatatcatgggtatcacctttattatcattatcattatcatgattatgatcatgatcatggataaatttcaaatattcagcctttgaaaacatcggacctaattttttattttgtgtaactttaattattttacaaacatcttgatagaaaaaacaaattaacaacccatttgaaaaatgtgtttattattacttttatgaattaaagttataaacatttctaatccaatttttttcaatgtatgatataatgtttcaaaacttgttttccataaaagtgtatcattacaaatacctgcaataattgtatgacatgataaacatacgataaattcaataagatcatcctcattccaccctcccacataatctattcgataacctaattcctctgtaagtttttgtgaataatctaagaaaatagttgcatcaatttcctctgtaatggaaagtatcagtgaacatagagtaatcaatatgattttactcttaaatgatattggaagtaataatctataggtattatgataaatatctgataatttattggataattgaaacttatcaacaatatttcttgctaatatcttctaattctgtatcaattttcatagcaggacttaatgtaaaattagaaattgaatcaggaagttttaaattatcactccccagtatctgtatcagtttgggtgatagtattggagatagtagtggtgataaatctttaccaaatttgaaactgtaaaagctattgatattatcctaaaggtgtgtaatcgtcaagtattgaatttaacaacgagttgatttgaatctatcaaagtaagcacactattactatcatcttccttatcttcatcatccaccttctcttccatcacttccctcttaacaacacccttatcaataaccttatcaacacaatgaacatttctcttcttacacccaccacatggtctcttttcatcacattttttctttctacgtcgacactccaaacaggacacagttgaccgttgtaccttactccctacaaaccttatacgacccatctctgctactcctacaagaagaacaacgtccaacgtacatcggaaattccagtatacattatagcaacaaagtcctcggaatttcccccctgcaaggaaaactgggaatcacttttcttttcagcctccctcctctacacttggtaatcatcttatactggttttatctccctggagagactgtaattagctagtattcacattgacaatggctacagacaacccctttgaatcatacgagaacccattctccgatccttatgttccttcaggtggtcaaactgataattttaacaataattatggtaatagtggatcagattttttaaattcatgtcaacagataaaggaacaaattaatcaatataaatcatattctaatcaacttcaagatcttcaacaacgtcaaattaattcagttagtgaatctgctaaacaagatgcattatatgaaattgataatataacaattgaaatgaaatcattacaatttgaaattaaaaataatattgaaaatgctaaattaataattaatcgttcagatcctgatatggttaatcaaataaataatcttaatagactttttcgttcagctttgaaaactgttataattgatgaagataaatttaaggaaaatataacaaatcaagcagttgaacaatatcaaataattaatcctgatgcttcatataatcaagcacaagaatttgttttacaaaatggtactgatgatgtatttcaaaattctttagaaatgcaaaataggaaagctgaagcaatggaagtttatcaaaatgttaaatatagacatgatgaattaattaaaattcaagaaatggctgcaactttaaatcaaatgtttaatgatttacaagatatagtacttgaacaagatgaatatttgaataatgctaatttaaatatagattctgctcaaagggaattagagaaaggtgatgctaatgttatacaagcaactaatatttcaaagaaaaatagaaaatgtaaatggattataatttgtctatgtattttacttgctttaataattgttggtttagttgttggtttagttaaaggtttatctggtcactaattatattattataaattatatagtatattattttataaatgttatttaaattgtatttaaatctgaaaaaataaaaatcatttaaatgcttttttaacaatttcttcaacttcatcccaatcatcatttggtaatttaatcatatcaataccaccaaaataattactaataaatttaagacaatcaaaagattttttactatcaataaatgaaactgaaacacctttacgaccaaatctaccagttctaccaattctatgtaaataagttgatggatcaggtctatgatctttatcaaatggcatatcataattaacaaccattgtaactgatggaatatcaatacctctagctaaaacatttgttgtaattaaaacttttgaacgtccctctctaaaatcatcaattaatctatctctctcttgagtttctaatgatccatgaagtactgaaactgcatgtccttccattttcattcttttatataataaatctgcagtttcctttctagctacaaatataattgatgatgcaattgttaataatccatataattcacataaattcttaaatttttcatcatcatttgcacaatcaatatataattgtgtaattgcatcaacatttaattcttcatgttttaattctaaggaatttgcatttggtacaaatctttcagcatattttctaacttcatccgcaaatgttgcactaaataaaactaattgtgtttgatttggtaataatttcttaattctcatacattgatctcccataccttgttgatcaagcatattatctgcttcatcaagtacaaatacacgtacttgttgaacattaataactctttttctaattaaatcaagtacaacaccaggagtaccaacaataacttgacaattttctggtctctcatttctctctaatataccaggaactaataattgtgtcttaattttagtaaatttacccatttcttgaataacatctaatgtttgtctagctaattctcttgttggtgataaacaaattgcttgaattgaactattattttcatcaactcttgatagcattgtaagtgagaatgcagcagttttaccagtaccactttgactttgtccaatcatattacgtgctggattggataataataatggtaatgccttttcttgaattttagatggtttagaaaatttcattgcatataaaccttttaaaagttcaggttttaatcctaattcttcaaatgatttaacactaaataatggagaatttggatctgcttgtaaatctgcaagtttaaccttgacttcatatgtagatttcacaagcttttcatcttcttcttcctttggtttttcttccttaacttctttaacttcttcaacaacttccttcttttcttccttaacttcttcaacaacttccttcttttcctccttaacttcttcaactttctttatttgttcttcagctttcttttcatcttttgcctttgattcggcaatattaagctgagaaagaagatctgcagcgtcttgtttatcagtaccagacatatctacacgtatactctaagataagatccactaaaaaggcaaaagaaaagtacttaaaattaaagtaaaattcaagaaacaacatttcaatgtcgtgagctacggcttgaaaaaaaaaatatcaacacttcgatcttctttaggaacatgtcatttctaatatttatacttaataacccccaatgaaagtacgatttaaggctattggacgtattaatcaaatatctccatcaacagtggacttaccacccaatgtaacagctgctgctttgaaaaaacatatcattctctctttaagaatgccaccaaattcacctttatggatttatgtcgcaaatgctttcgtacctacagatgatacaacactagaaactattgctggaatgtccagtaatactgatgttgtaataacgtattctgaagttgaagcttttggttaatttctctatctttttttcccgttccatactttagttttttattattgttttatatactggttatataaaattgggtaacatgtatattatatatttcattatcatatcatttgggtgttttgtcattaattgtaaataaataaatagtagcattatagtttcattaattagtttcagttctttggagtaccatctggtccgacaacggaaacatttttccattctttctttgtaccatcagaataagttttaacacgataagtagttgtttcaacatcaccattatctaaagtaataaccctagtttcacttgattgtccaacaacagatttaccatcattattctcatcactattatcatcattatcaaatttatttaaaccacctgtccatttagataattcatttgattgccatttattccaacgacgacgattttgttcagcaactgcacgacgcatacttgcttgccaaccaagtaattcctctaatgatttaaaataaatcccatatttatgatcaacatcattttcaatatcttcacgtgataatcctgaatcattcttacttacaccaaatgcattgttttcaccagttccataatcataaggaattttactctttgggaaaagacaatgccaattagcacgttgatcccaaactgctaaaccatctgcatgtttacattcttcataaatttcaggtggtggtataccagttgaaataatttcatttggatatttattaactcttgaaatacctaatgttaatggtgataaaacatcaccaacatcattttgtaatccacgtaacatatcaagtgcacttaatgccatatcattggttcttgataatgtattaagtaatgtacctgtaatattggatccgactggtccgattccaagaatatctaaatctgaatcattatcaaatggtgaatctgttccaactgtaacagaatttatctttttatctgaggatgagttagaagatgagtcaaataatcccatatttgttttgctttgtctaacaatctattggtaaaagaaagaaagagatgactaaaagaaagatgcatgtggataggtatttaaattatttcaattacttcccaaaagggaaatattaatttttccactctattaatgtggaacattctggaaataataaatttaaaattgctatacagtacagttcttatatacaaagatactattttaattctaactctttctccttttcactctcaacattataaacttcaacactagtaccaacaccattggaatcagttgaatgttctctatcccattcctcaagttcagataatttaattttaacaacagtattaccaatttcaccattttccattctataaataacttcccgatgaacatatctacctattttaggcattgcatatttccaaataaaataataaacaacacatgcaagtaataatccaatagtaacaattggataagttgcataaaaaaatgaaacatcactaccaattaatgtaccctttggtggaacaaatgcaattgcaataaccataagttcaaataataataatataataatacaaggtaatggtaaatattgtccctttgtacctaaaccttttaattttctttctcttctaacttttaataaaccaaaaataagtaataatgtaaagaaatatcctgaatatgcacccatatcaacaataaaattatatgctgaaccagccggtggaccaataatcataataaaattaactaaccaagtaatgaaaattggtcctaatggtgtaccaaatggccaagttgatgtccaaaattttgggaatggtaaaataccttgtctaccacattctcttaatgctcttgaatgtgataaaatagctgtaattaaatgtcctaatgcagataatgcaaccataacggataatgccttagttgcagctttattttcaaatgcatttttaaataataatgttgcaacagaattacctgaattcttaatttcctcaggtgatgaagatgcataatatgctgtaataattaaaatgtaaaagacaaaaataacaaataatgataatggaacaagtttagcaaaagttcttaacattaatttattatgaacttcttctgcattttcaccttctgcttcacctttttctattgcttttttattaccaacaaattcagcaacgacaccgaatgcataactataaccaccatatgagaatgcaactttaataatagaattagcaatattattaccctctgttgttgtaccttcccaaacattatggaaactttgatgaggatctttaacttttgtactaccagctaaaattgcccaaccaagacaaaccatgaaaatcatgaaaataactttaacaaaacctaaaacattttgtaatcttaatgaccatttagtactaattgcaatacataaacttgaaaaagttaaaacaccaattccaataccacgataattccaatcccctacttcaacttctgcagcagaaagaatatattgaccaaatgctaaagctgaacttgttgtaaatgataaaataactgaaatagctgcaaatacagttggaactaaaaattttggttttggatatgcttgttctaaatatgcaacatcaccaccatttctatttggataataacctgcaaattcaatatataggtaaacactgaaaattggtaaaaagaaacataataaccaaagaacataagttgaaccaattgatcccattgattttaaaattgaacctggagtactgaaaatacctgtaccaacaacaccttgtaagattaaaacgataacactaattgaatcaacagaataacctaatggattaaccttttcttctggtgagtattctaattcaccattaataacatgaattgtttcaacatgatcaagtttttccgatgtattagttatatgatgttgcaataacctgaattagttgatgatccaaatgatacatctgattcacgtcttttattaaaccacttcatctttttatttattgaatgtattttatttttaatacttgattcatataactctgaggaaagccatgctttttatacatgtggtagcaaaaaaaaggtttaataattatttcttataaaaccacagttaatttagaaggagagattaacatccaaggcattaataatacaacctccacaaagaccaacctggcaagaatccattgccacaaagtaattctaaatgcatatcacagatctaatatacacaaggtacaatctcttgataagataatccacaaaaatgtaaactgtggttgcagggaccacaatagcgaaaatttatgacggttccgcatctcatctcatcgataatctcatctcatctcattcattatatatatattttaagtaaatcaactctattacctttgtcatagccacgattgggactataatgtccatgagattgacaatactataataagagtaatcatttcaatgggtaatttatctatgagtatgtttttaataattatataatttatggacaattatggactataagcttcagctaatttactgtaatgttctgccaacgatttaccaccttcacctcctgatacatctaaaactgtagccacttgttgtacattgacatataaaaacaatttcttcttttcatcacttaatccttcacttaattgtactaaaccttgttcataaatattagaaattctttcaactgatccctctaatggaccttgaacattaatatcaagtatttgtaataatgatgcaataacagttccaaatgattgggttaattgtaatggaactaataatgtatttccatttttacttgatataacttgtttaattaacgccgtggatttaagtgtacttgaaactcttgttgataaaatatccatattacgttgtaattgtggccaaagaagaattaattgtgaatcaaaatatgattccaaaagttcaggtaaacataaacgttgtacatctttttgcatattttgtatcttatgaatagtatataatataccaaaataatcatttgaacattttttcaataaatatgatgtaaaattattacctagctttaaaactggtgaccaaattgatttaaatatattatttatttcttcattattttcataatggaaaaaatcattcataaatgtaaactctatattaatattatcaataatggtacaatttaaaaattggaaaatttgttcaaagaagaatttattgttattgttattgttattagatgttgttgttgataatgatgatgttgtctctgcaattttagcaaaaattgcatatttattcttttcatcaaacaattgctcatatcttcttggtaaattaatcaaatattcattgattgcatttgtattatccaattgtaaactaacaggtaaatttttagtactattagatgtcattgttgtattactttctgcaatttgcagtacttctaatgaactaatatatttaatgaaatttgaataataataccatctaatagtataaatataagcagtttcaatttctttagcaatagttggtgcttttttttggaaaaataaattaatttccttaactttaagcattttttgttgaactttaatacttgaagaattattcatacgtaaatatttaatattttgaatcataaattttctaattctttcaatacatttccattcaagttgatcaataagttttaaaaaatattcaacatcattttgatttaatctttgtgaatctgaattttgtaatatttccttcttctctaatatttcagttaaactttgtgcccaaatttcattaatttcagaattaagtaatattcgtatacatttaggtgaaattaataaatcattaagtacaggtgtaagtaacatatccatctttgatgatttccttatttcatcatcaagtccagataatctagattgtaaaacttccatttcattggctaatttatgtaaatttgattcaaaatcttgcatgtattgattcaatggaacaagtaagtttaatgaagtttcaatattatcagacataatattaatgtctttttgtttacttatagtatcaattgctaacaatgaatctcttagtgtggaattaccgttaatttctttaccatttgcatctttttcatttccatccttaccttcttcttcatcttcttcacctaattcaatatcaaatgatggtgaattgttgaatttccgatttaacaattgtaaacgtgacattgtggatgcaattgaaggttcctttgaatgacgtttatgatctacttcttgagcagaagatctcttagatatactattacgatggacagttgtcattgttgttttaaataaagaacaaagaaagattgtacatagtaaacgaaattgtttaaatttcactaatttcctactatacggcataatttgatcttccttatttcattatttctttatcagaatctatctatattccccaatggactacgtaaagagtacaaattgtggatattgccatggtaaaaagagggaagctcaatcatgggcattggaatcaatttcaaagaaaatggaaggaaaagggtatagtaacaattgttcattaagtaatggtattgttgatgaaatgacattgaaagaatatgaagatcaaataaagaatggctggaggagaagtggtacatatatgtacaaaccagatcttttaagatcttgttgtcgtcaatacactattagaactaattacgatatgtttgttaataatggtcattttacacacaatacacgtaaaacgttacgtaaattttacaataagtttaataatccatcatgtggtaataggtaaatcattattagagacatatttaactagagatcgtggcgatgatttctatacggtattattgccaaatactttctcaatggataaatatgagttatataagaaatatcaaattcatgtacataatgataaagaggatgatgtcaatgaggaaggattttggagatttttatgtgatgatccatttaaagaggatgttggaccaattgattggttatctatcaatagagaatggtcatctatttcacttgataattataaagatgatgataaatttgaaaatttaaagaaattacgtggtcccattcatgaatgttatattataaatggagaacttgcagcaatatcagtattagatatactacctgatggtatatcatctgtttatttcatatgggatccaaaacatgcaaatttaggtcttggaacaataagtgcattaagagaaattgtaataacccaaatacttaataaaagttattattatctaggatttttcatacctgattgttcgaaaatggtttataagggtaaatacggtggagagatacgtaatttcaccaagatggagacaccaaaatgggtaagtttagaaacatgcaatgaaatgcgcatcattcaaagaggggaggtttgcagtattcgacaatgaaggtaaagatgttgcagagagtatgtacggagtggacattaaagataatgataaaagtcttgtaattagtaaataaaccatgtctcttcccaaaaccaagggtggtaccttgcttgaaaagtttagagttcttctatatagcgttaaaagttcataattttcattcaacgaataataaagcgccattatacttatatcatatagtacatcctcttataccccaggcaattgaccatgtttgcaccatctagatggtcttcattgactttactgaagtcaccattacgttcatttcataccccaatatcttcattgaaagagctcattgaaaactctccatcatattcatcatacagccttcacttcaagggtccaacaatttcaatttcaatttcaaattagaagtttaaatactactaaacaaacatctaacaatgttatacaatcaacaacaacatcaacaactgtatcaccatttagtgctgaagaattagaggaggcacgtatacaaagattaaaaggtttaggtatattaactaaattcccagataaatggattccatatatggaacttatgcgtattgagaaatcctattggtacattattattattatcaccatgtatgtggtcaattacaatggcagcatatatgacatcagcaccattattatcaactatttggatgttatcagttttctcagttggtgcatttgttatgagaggtgcaggttgtacaattaatgatatgtgggatcgtaatttagataataaagttgcaagaacaattgaaagaccaattacttcaggtagagtttcaatgaatcaagcatggtggtttttatcaggtcaaatggcaagttggattatttattcttttacaattaccattagattgttttattcttggtgcttcatcattattattagttggtacttacccattctttaagagagttacatattatccacaatttgttctaagtgcatgttttaattggggtgcattattaggatttcctgcaatgggagtttggaattggcctgttatgattccactttatttatcaggatttttctggtgtatgcattatgatacaatttatgcacatcaagataaaaaatttgatattaaggcaggtattaaatcaactgcacttaaatgggggacatcatcaaagaaaattttcaatgctttaagtacagctcaaatgacatgttatttaacttcaggatttttagctggtatgggtccattcttttatttagctgcattagctggtggttatagattatttaatatgactaggaaagtcgatttagataatcctgcaaattgttggtattggtttaaggaaaatattaatactggtcatgttttctggattggtatcttattagattatttatggaaaatctttcttggttagatagttacaaaacttatataaattaaaagtcagttttttcaacaatttcctcttcctccacaggtatactccattgttcaacatggaaattagatttactatttttaaaacaatattcctttaatcttttatccatcatacccatacttgttaaaactggtaaacgtaaaatatcaacataaccttgctttatcttttccctttgagttttataaactttttccattaatacatttaattcatgtgggaatggaactaatcttaaaacaccatcaaataacatactttccaatatatctaataatccattactatcatcatataattcactactaatactactcatcattgttatacgacctgaataagtattcataattttctttaagccaaataaaaatttgaaaacattacttaaattaattaattcatctgaacaaccataaatcattggattaagtaaataaggtattgcaattcttattaatttattattatctttagaatttttcaattgattttcaactattttattaacttgtttcaatatattatcataaccatcatcaagtgaaatataactaatttcaggagatccaggacttggacgtatatttgtcgttatatcaaattgatgacaataatcaggatatttactattatcattatcaatttcctttaaattattattttgtaattctttcttatacctccaagcaatttttaattcattatttgcattaatattactaacacttaatttaccttcttgttctttaactaatttttttttacgttctttactattaccagcataaatattatataattcattaccataaattgaatccataccaataacaatacaatgatttaatattttaccattaccaacaagtctattctgtattataccttcacttacaaaatttttaactaaaactccactaaaatctgtactaccatcttcctcaattaatatcatattatccattggaataccaccatgaactaaaattgtatcaatatcctttgtacctgttgacatgcatggtaaatgtgagagtactattgatggtttaacaccaggatgtgaaaattcttccttcacctccgtattcttagttactggtggtttactacctacagaaacaggaggacctctaacagatctattaactgcacttctattaagcattggattggcaacattggggacaggcaccccaggagttctctccctcccagacactatctctcctcttctcctaaacgacattgtctataaacaagatcttctttataatatacaactattaacggttgaaatttttttaataattttttccatttactaagagacagtggagagatcactgatttttttattttactttactttattttaatgattattgtttcctctgtctttctttctgtaaactattgcttatcaacgatgaatcactcgggaatgaatgaggaaggtaataaaccatctgttgatgatgatgataaaactttatatcaagaagatcctaataataatgataatgataatgataattataaaataacgccatctttaccatctatggcaaattacgtaatgggatcaaatagattagatgatttagaaggtagtacattaaatgatggagatgatggtggtgaaagacatagaattcatttaaataatggtgttgatatggatcaagttcatgttaaacaattaaaatataataaaaataaaattttattagataggagtattaataatacaattgaattatttaaagaatttaaagagaataatatcaattcaccaattcattatcctattgaacaaatgattgataatggttatgattctaaattgaataatataacatctaagaatgctcttagattagagagaagaagttcagctgataataataatgtaagtaacattgaaaatttatttgatatacttaaattagatgttaatattggattaaagaataataatgatgaatttattaataatttagatgattcaacaatttcaatggttcttaatgctaaatttgaacaaattttaaatcatttatataatttaaaggaaagagttgaagatatttcatcaaaagttttaattaccggtgatttaaattctggtaaatcaagtttttgtaataaattattaagaagaaatttattacctgttgatcaacaaccttgtactaatgttttctgtgaaattattaattataaagaaaataatttaattgaagaagttcatgcaattccaattggttgtgaatataataaaagaaatcaaacaacttataatattttcaatattaatcaattagaggatttagtttatgaaaatgataaatattcattattgaaaatttatgttaatgataatagaccaacaagtgaaagtttattgaaaaatggtataattgacattagattaattgatgcaccaggattaaatttagattcttatcaaacaatgcaattattttcaagaaaggaagaaattgatttagttatatttgttgttaatgcagaaaatcattttacattatcaggtagagaatttatttcaaatgttcataatgataaaaagttaacttttatagttgttaataaattcgattcaattaagagaaaggataaatgtattgaaaaaattatgcaacaagttggtgatttatcaccagaaactcataaagattctgatgattttgttcattttgttacatccaatggtattgataataataaacctaatggaagtgatgatcccggtaatgatccaaataatgataataataataataataataataatgatccaaattttgatagattagaggcatcattaagaaattttattgttgataaaagatcagtatctaaattattaccagcacaaaaatatcttaagaaaatatttcaagaaattattgttttaattaatatgaatattaaagaatataattcaaataaggaagaaattaataaagaattaaatgaaattaaaccaaaatatgatgaaattatcaaacaatctattaaaattaatgataaagtaatgaatataattgatgaatattctgatgatgtatatgagaatacacgtaaaaatattaatgacaagattgataaatttagtaaaattgacaaaattgataaaaatgttacaattttcaatattgatcaatttattcaaaatactaaattaaaagttgttcatgatattttatcaagtattgaagattcagaagattatggtagattaaagacattacatggaattacaaatattagacaattaggtaaaaaattattaggtgaagataatttaattgaacataaatttaaacctgaatcaatgtattcacataaaaaggataaagaattgaaaaatcaaattaatattaattttgaaataattgatttaattgattttgattcaatttttaattttctccaaagtattcaaaatattttcaatttaggtagttttagtaacctgaaaaagatttcaaaattaaataatgaggaattaagtataagttcaataatttcatcaaatattttcaaaactggtatatcaagtgcatttatattatatataccaaaagttatttcaatatttacaggtgttaaatctataataaaactacctaagatagttacatttacagcagttggatttatgattggatatccaatatattattttataaaagaatcaccgaaaaatgtacataagaatataataaaaaagattaaatccaatcttgaaagggatgattatattcatcttaatagtttacgtataagtaaagaagtacgtaaagtattaaattatccagcaaaggatgtttcagttggtattaatggattaattgaacgtgaaagtaatttaaagatgaaattaattaataaagttaatttagttaagagtaatttaaaatttttacaaaatattaaggaaagggttgaaattcaacaagaaattgtaaataaatttcaattagatattgactaattgatttaaagtatatagtgcatgtatttatataagtaaaggaattcaaaaataaaattatcatgaaagatcaatgctaccatagcgaaacctggatctctttacattacatctatctcttttcagtaatgattagaaatagtataagaaacagtattagaataggtattagatatcaaagtacgatatccatcaatcctaatatcttagatttacgtattggattaattacagacataaagagacatgaaaatgcagattcattatatgtttcacaaattcgtttacaaggtgaagaaattaaacaagtttgttcaggattagttggattagtgccaattgaggaattatccaatcgtagagtaattgttgttaataatttaaaaccttcaaaaatgagaggtattaaatctgaggcaatgttattatgtgcagatggtggtgaagggaaagtttatccagtgataccaccgaaggatatggaaattggatcagtattagaatttgatggagttgataaagtagaagttaagaaaagaattaagagtaaggtttttgagagtgtttctgaggaattaaagttgaatgataaatggcaagttgtttggaaagattgtttacttgctaatggagaatgtgttgctggagttggtgatgaagggtatattggagcagttgtaaggtaaaggcttagttaaataagacggcgacggttactatgtctcaaataggcaattttgcttttttgaaaaaaatattttttttgcaagaagttttttcactttgatttatttttattagaaaaattttctaatatttatttgtttcttgtagttttaattatcttttagatcttgtatataataatcaacaatggcattacaaatctcaccaaaggatactgatttattgcttaagcaaaagaatgttctttcaagggatgttattgataaatattcatatgcaggtcaaattactcaaacttgtttaaaatatattatttcattaattaatgattcatatcatcttaataaacatgaaaaatattcaccagcagaattatgtttattaggtgattcatatatgcaaacattaattaatcaaaattttaaaaaaattgaagagaaaggtattgcacaaccagttacattagatattaataatattttaagtggttattcacctgaattaaatgatattaataattcttatttacaagttggagatattgttacaattaatttaggttgtcatattgatggttatacatcaaatttagctcatacaattgtaatttatccaaatatttcaaatggttcaccaggtccattattaggtgaatcatcagatgcaattattgcatcatatttagcaactgaagcagttattacattattagcatgttcattaacacctgaaaaaattccaaatgaattaattgaaaatggtaataaagtagttacaggttcaatgattagaaaacttgttaattcaattgcacaatcatataattgtattgttgtaccaacatcaaaagttagaaggataaggagatttttagctggacaagctgaaggtgttgttgcagaaagagattttaaaggtgttgtttggtcagaacaagatcaagaagatgaattaataaagaaagcttcaagcggtaatggttctactgaattaactattattgattcaattaatggacgtaagaaattaaaggagaatgatattgataatacaattccaagtgatgaatttattgttaaaacaggtgaagtttatagtattgatattaagatgagtccaattaataaagaagaattaggtattgttacattaaatgtcctcaattcagaattaaagccaagtatatttattagagatgtttcaattagtgaacaattaaaattaagaaatagtaggaaattattatcattagttgataaaaagcaatcagtttatccatttaaattatcatatgtttcagaaaatttcccaattaagggagaagatttaaatactgaattgagcaatattgaaaaagatgttaaaacatttaaatttggtgttggagaatgtattaataaacaattatttgttaataaggcaattttaagtacaaaatttattccattaagagaaattttgaaaacatgtacatcaacaggtattaatggatatgatgcaagtaaggcatcattaccaggattagaattaccattaccaaaattaggtgttacaagtttaaaaatgaagacattaatgaagaaaagtttagatattaatgttattagagaaatgagtacaattgcattaagtgaagataatggatgtattagattaagtggaggtaaagaatttggagtaagttatgtacattctgaatatgaattaaatgaagatgtatctaatattattaaacaattatcagcattaagagaagatgaacgttttggtattaaagttgttgaatgtggtgtattatagttatagttatagtatagtacatgattacataagcataaactaaaataaaataatataatattacataagcaattattattacgtaacacagacgcgactataatatataatactaacccgtgcaccatataataataaaataagtactataatacttaataacaataataatagaatgataataataataataataatagaatttgaaattaaaattgctggacagtgagagtgcgaattgtattaattatactagtgtatggtctctcttctgtttatgtttataatattgttactgattctgtattcattttactgtattgtttctctttccctttcgtttactttcatttgatcaggctatttgtcaattaatatcgtatgtattatacacacttcatcagtttcattcaagtttgtacttgtgttaatttccatttagtatagtttaattatttcaatatccaataggggggctcagtttgtgtgtgttttattcattagttatattataagttatttatcaagataatatatcattacattatttactgcattgatgatcattaccatctatacatacttagttactcataaatatcaatcaattaatcataataataatacatatcattattgtttcgtaatataaggatattcctcccccgtttgagggaaaaaaaaaatttcattattaaccagggattatttacaatatgagtaattcaattaattaatttacacaatatctattctatatacttacatacatacatcaatgatatgaatgatataatgatataatgatataaatcatacattataatatcatttaattgatttgccacccttgaaatattcccattcatccattcattcatcaatacctccatcccctatactaaaataattaaatatcgcgaaattttccattttatcattgaatcaatcatccccaatacagaatacaaaatactaacattgaatactcatcccctcttttaatatagcaacaaaaaactaaattaaataaaacaaaacaacaatgtcattaacacgtgaagattctgtttatttagctaaattagctgaacaagctgaaagatatgaagaaatggttgaaaatatgaaaaatgttgcatcatcaggtgatgaattatcaattgaagaaagaaatttattatcagttgcttataaaaatgttattggtgcaagaagagcttcatggagaattgtatcttcaattgaacaaaaggaagaacaaaaaggtaatgaatctcaagttaaacttataagggattatagaagtaaaattgaattagaattaacaaatatttgtgatgatattttaaatgttcttaataatcatttaattccaactgctcaatctggtgaatcaaaagttttctattataaaatgaaaggtgattatcatagatatttagcagaatttgctatttctgaaaagagaaaagatgcagctgatgcttcattagaggcttataaatcagcttctgaagttgcagttactgaattacctccaactcatccaattagattaggtttagcattaaatttctctgtcttctattatgaaattttaaattcacctgataaagcttgtcatttagcaaaacaagcatttgatgatgcaattgcagaattagatactttatcagaagaatcttataaagattcaactttaattatgcaattattaagagataatttaactttatggacttctgatatgtctgaagcaggtcaagatgaatcatcaaatcaacaacaacaaactgaagaaaaaaattaattctttttaattaattataataattttaatattaaaagtaaattacattaattaattaagtattgtttttaaatattttctttattcctttttaaactacttaccaaccctttaaatcccctttttaatatattatatactgctatactgtgtattttttatattatataattatattaaatattgtattgtattaaaaacaaaatagtgagtgagaaaatacacaataaattaaaattatattacctaaaattaattatgcattcccttcctctcatcaacttcttccttcatctcactaaacaatggactcaattaacctcagtgaaccaccaaaatacacaattatctttaagataattaattttatcatagccaccttatcaatactatgtggactttctgaaattttcactaaatttgattatttctttcaaggtattttaattattttaataggatttcttatcatttatttagaatttaaaattccaccaaaattatttacttatttttcatcatttttttcattccttggtcgtggtagtatttatattataattgcaattttaaatttacatggtagttttattagatttataattgcattatttattttattagttggaattgtttatattggattggaatttattaataatatagaacctcctgctaatatgtctggtgaaaatggatttataaataatgatgaatttgatgatattatttaagtaatatgtgtaattatttgtgtattaaataattattgagaaatcttaaaaaaatgaatttaagaaaagtggaagcaagtttaaaattttacaatttgaagtatttggggatattatttgtattttattatgctttgtacttgatgttgaattaagatttgaagttgttttgttaattcaaaatttgcccggggtcacgtgaaaaggcaattacgaaaatttgcgtaatatttacgtcaacaactaagactggatggccaagttggttaaggcgtgcgactgttaatcgcaagatcgtgagttcaatcctcactctggtcgttatattttttatgataatttaatcttatctaaaatttgaaaagtttatctttttttaaaatatttttctattactttgtgtttatgcatgtcaattgtatataatataattactttctttttgttatacaatgtatcacctattcctccttgagaaataaattttaatttttttcaatagaattgatttcaaaattattgattggttatcaattggaatgttatactaatttgatcttacatttgacaaaggacataatttattaataatttgattaaatttttaaggctgaataatacttatttgatttatttaacagtttatttactaaacaagtttatataataaattgtacaaaaaaatattgatagtaatattactaaggatcccctaaagactttaccaaatattcctttaacttcaagacatttaagtatggacctgaatgttttccacatgaattaatcaaaacttttggttcacttttacaaattaaagtaaataccatcttacaatattgtggtctccaggaagtatgtataatcttcgatgttttgagaatcaagaaagagattcgtgaaacattcgcaaaaatcttgaacgtgaaagagattgtcaaagataatgttaatccagaaatggtagtaatggtcttacacactcaagaattgtggaaattgaagaactacttaatggtaagaaagctttggaaatcctcaacatcagcaacttaggtaatattgaatattctggtactttaggtttgtatttacacaatttcatcaagagattcagagaacttaatgaaaaggatttagatgcttgtggcttaatattagtcagtaaagttcttattggtgttcttgatgggaaacataccagtgaattctgcagaatacttagaaataccttaaataagtttatggacggtgaaaaaatctttaaaattgaagatttaacagcatttggtgaagaaattcataaattagaagctgcagctgcctataaatacaaccctgctgttttagtttcacatactggaactagatcaatttctttagaaaaacattaatagtgttgcacctagaagctttgttccacaagatggacatatttggtgtgctaagtgctcattctttcatttaccaaacgaacacccttttactcgtgatggtgctgcaaatgctcaattcattaaaaaatatgctgatgctattggtgaatttgacaggtggtacagagcaaaaagaaagtttggttctagtaataaaaggaataggaagaaacctactcctgataactcaaacaaccatggcaataatgctaataaaaatacttaactaaaacagattgatgatttatctaaacctttaaataatttaaatatgaactgtatagaacacaagattattgattattctaatttaaatcatttattagtatagtatggtctccaaaggaaaccttttgagacactctataaagaaacaacatgatgaaagaagtggaaattaagaaagacccaatttttcttacttgaacaatctaaagcgaggctttttttcttattattgacatgtacatgaaaactttatcttgataaactaccgtttttatcataagacaaataacattgaatgaaagatactaatgatccacttaaattcataaactttttactcgataaattgcctttattacttgaaactgatgtaacttctggtaattctttacaattaaaaaattacaaaatattttttatgaagttactaaattatatcacaatgagaatgatcaacgtataagtgtgactaaactaaaacaattagctattgattcgattttcagtttcaatatatattatgatgaatgttttgctcattctgaaaaagaacagcttacaaatgagagattatcatttaatagtgaactcataaaaatgttgaaagcaaattatacaaaaaatattgaaaatttaggtaaggaacaaataacttcaaaatcatttgaatttttgaaaattgatcttaaattatctcaagatattgcacatactctgaattttatatttacagcttttttcaataagaaaaattggcaatataacggtataatagattcaccatttattgtaattagaaaatctggtatttatgataatgatgaatttgaagatataactgagactgatattgaaattgatacaaatattgaaaaagataagcaaatagaaaaagaaaataatgaaagagataattcctctgatgcaacagagtatttatcagaggatgaattaacagtttctgatcgttcaattaatgatgatgatgataatgatgatgatgatgatgatgatgatgatgataatgataatgatgatgatgatgatgatgatgatgataactattctgatatatcaggtgagatgacaattgactatgatgaatgaaaataatatactaatcaaatctacccccttcaatatcaaaatataaattagcagttttgaaattaaatgctgaataaattggctcaccataatcattaaatttatgatcaccaggtacatgaggacctccacaaaaatcacaccaaatagttccattacctctcattctaaagcgatctggcatacgaataggaccatgacctctttcattaaaattatagtcatcaattaactgtgcaacccttacatcaaaactaccttcatgattcacctgtttttgtcttttatctggttgttgttgtttttgttcagtgatttttcttttaattgtaacctccattggttcaaggaatgatttaccaggaataagtgttattgaatcattcatatcatcttttgatactaatttgaaatcatctaaaacagttattaatattaaattctcttctcttcactaattgcattattggcttccttagttgaatattcaacaataagcttttccttttctggaatatactgcttacttgctaattttaatgtatgtaagtaattgcatagattgtgaaaataccttcactatctttatattgacttaattcttccttaacacgtttgaccattcttctgaaatatataattgaacgtacattaaaactttcattagttttttgatgagcacttagaacaatttcacctgcgaagattctatcaagattaaataatttagttgctaataccatcagttgtatcattgtcattataacgtttaataatataccaaatatgaactgcattaattctttcaggtttattattagttacctttaaatttcaccaaatcaattactttttgaccccaattagtatctttaatgaatggataaatttgtttaataattgtattaattccataatgtattaaaatacgatcaatagctgataatatatgaattatgaaatttttaccatcattactatattttgcaaaagttgtttgcttatttggataacaataagccgaatctgaaaattccatacctctatccttatctaattgctcaaattttgatagctctgaaaactcataaccaattgatgaaaatggagtatattttgatgattcaacgaactaattttttcatattttcaatccaatcattaattttatcaccttcagagaatggatggaaatcatttgattgaattgcactttgaacccatctatcagtatcatgtttcaaaaatgtgatatcctcaggtttaagcttaatatcctcaacgtatagcattgtgttagttgttatttgttgatataaaagaagaacttacattgtaaagattggatcaacgagcttggtgaataattgaataattttaaatttcataaaaaatattacgtaatgtgttaaagtataaccttaaagtataaccttaaagtataaccttaaaatatatttaaatggtagcagatatattaaattataggacaaatatatagcatgtaattagttatgatgaatagtttcttataagtgaaactcaattaaaaggactagttattgattctattttcagttctaatatctattatgatgaaagtcttactcattctgagaaagaacagtttacgaatattcgataatcgtttaatactgaattttcaagcaaattaatattgaaaaagataaacaaattagtattgaaaaataagcaaataaaaaaaatattcatctaatgcaacagagtatttgtgagataatgaattaacagtttccgatcattcaattgatgatgatgatgatgataatgatcattttgatgaggcatacaaatttgaagtatccccgttaaaagctataggtggtgatatttcaaactcaactttgaaattattctgatcattttgataattcttacaataacattatcaacaatgattttctctccgaaattcaaaacttatctaataacaatattacaaatgattcatctcatttaggtgatgataataacacagctcttggaattaaaattgcattctttaaaatgataccattttctaaatgaacatcactcatagtgtggtattttcttctaccatcaatagtatagaacaatctcacaattttttgacatccactaaccaaccaatatcattaactatataaatagttgtaccacaatcaataagaaaatcatcacggcaatttctaaatggattctcataattgattgaatcttcattaattcaaaaacagttaacatacataagatgacctttctttttgcatttgaagccagttatgtcgcagatttgcatatgaaacagaattttgatttatctggaacatagtaagcaataaatgcaaaaaaaagggtcatttgtaatagtgaaaatatcatagttaaatgaggcagctaaattcatttttgtcacttttttggttaataaagattggaaatctgttaaatttatacatttttatatacaggtttctagttgtacttatttaattataaaagattaaattacattgtttgcataaaatggtaaaagtttatgataatcgaaatctttcaaatataagtttcattgcatgggtgaaaatttctttatagctatcttgctatatttataggtcttttaggtggttttgatgtcttcaaaggaagtttcacagtttgaggcaatttccgagagttctttatctttgtttaattcttcaaagatttggtttaaaaagtgattgattgatttttcgtctaggatgttagtggtggatgttattttgaaattgatgtcatatttcaggacgtttgggtactctgttttgtttgagagcatttcatatatttacactataatttaactggaaagatacctctatatgttttttttgtttcaagttacatccatcagcattcattgttaagtttaaggtaatgacatttgaatcttgtgactccaaagacaccaattcttcaaatgaatttataaaactttttctttaaatgatatttttgatctaagattcttgctttaaagcaacaaattaaagaattaaaattaaaataaaaatcatctaaacattctcataaaaacccaaaacaaattttaaaaaagagagagtcatacaaaatatataattttatagcaataatttgtaacatttccaatccatatatgttctaataagcaacaattgaaattgcacactagaataccgtattttttgtgggggagatgattctagtttggcatgaacttatcataaatacttctacttctacttcaattttcaaattaccttttgataatataaagaaaccaattaaaaatgtttcagtgtctaatgatattatatgtcatcaagttagaaacatcaaccccagctaattgaaatgatataaagggcatcgataagtttatcaaattgcatgatggcattctatttaaaacaataaaaataggattacgtaataaattttaattagaacaattgaacggattaactgttttctattgttataaagagggggtgtattgtttaataatttattaagaaacgagtgtttaagtgtattatactattgaattattataaagaatattgtaaaagagagagagagagtgtgtgtgtgaatgaatgaatgaaattagtaaagataacagatagcaaatacattaacttaattctttttattaaaagagagatcgaaaaatccaccacctaaagttgattggaaaaatgaagatgaattttgtctttgtaatgcatttgatctaatttgattcataatttgcttttccttttctgcaccgtaatttaatctagccttttgagcttcagattctgtagtattttgagtctctgcctttggagtgaacatagctatagttgtttgttttgctttaaggaaagtaactagcaagttattttgttttaatatacagacacgagatgaggggataagttgtagtttaaatagaaatgaaattaattaatggattttattaaaggaatgacttactccgaaatagaatgagcggagtccgcgtttactattttattgctttattaatttactaatactttggtgttttataagcaatacatagatcatatgatcctatgactcattaagtttattaacttctctattctatttttattaataattaaacaccacatgtatgtattataaaagccactgttcatataagcctagtcttcaataactttaatagcacccaatggaaaaactataaatttttcactcactaattatatggcggaaaaacttttttttttaatttttctattgtgtcaaaaagagggggtgtggtttaggtgatttactggaatactacatggaataagttgattatatcaagtattaagtatgtgatgatgatataaatagaaatataaatagaaatataaatatgaatataaaaataaatattgtaatattatattaaaagggggacattattaaaaagcaaattattgtagaaaagttaacagagaggataaacaagaaaaatagcttaattctttttattgaatgaaatatcaaagaatccaccacctaaatttgattgaaagaatgaagatgaattttgtctttgcattgcatttgatctaatttgattcataatttgcttttccttttctgcaccgtaatttaatctagccttttgagcttcagattctgtagtattttgagtctctgcctttggagtgaacatagctatagttgtttgttttgctttaaggaaagtaactagtaagttattttgttttaatatacagacacgagatgaggggataagttgtagtttaaatagagatgaaattaattaatggattttaataaaggaatgacttactccgaaatagaatgagcggagtccgcgtttactactttattgctttattaatttactaatactttggtgttttataagcaatacatagatcatatgatcttagtattatatagtatagtacatgactcattaagtttattaacttctctattctattaatattaataattatacaccacatgtatgtattataaaagccactgttaataagcctagtcatcaataactttaatagcacccaatggaaaaactataaatttttcactcactaattatatggcggaaaaacttttttttttaatttttctattgtgtcaaaaagagggggtgtggtaggtaatttactggaatactacatggaataagttgattatatcaagtattaagtatgtgatgatataaatcctacttactactatatatttatcacgctaaaaaccgcgatttttttttatttcctgaacaacatctttgggactttccgcactaacaaatgtagccctttttcttatctgacctctagttatcgagttatagccctttgaagtcgattttttcgatttttcaaacgttcatatctttttctttatgagtctttgaaacacgctcaatggttcattagatttgtagttgtctgaagtttacttggtaattttcttgggatcatgggagctttcctccgtcctcgaaaggcatttttagttttttgactttttgtccatttttgaccacttttaacaggctctagctctttcaaacaccctcccaggtatacttttgaaaaatccagcatatagttcgtcataatctctttttaatgacactacttatagcttgtcacaatttggtaaagtactttaagtatccagttttcagtaaattttggacgttttttttagaaatttttcaagctagcttttttgttactttttgttaacaacatttaatgtttagaaactcattttgtagatgtgtttttaaattattaactgatgtaaattatgggtgaaactgtttttttaaaaaaatgttatgatttaatgtgttcaaattttgctctttttttttagcaaaaaatattaaaatagtgataacttttttttgaaaacctaactaaaaaacgatatttgatattttgtagagaaaaattttctctttcatatggtactatttacgcctaatttggaagagattggaaagtgtagtacattaaattaacgctgattttaacgcttttcaaatagttatagtgatagttgattacgtaaacgcgtatctaaaattcatgtacccattttttcatgttacattaatattccatttaatggattctttacggtttacagactcaaaggtttactattgtagtgacgtttgttaatattagattcctattaaatataaaatatgtagtagtaagtaggggtcaaaatttcccgtagggaaattgaaattaccaaacccaacgctttaagcgtcagtttcccctttaggggaaatgacaatataaatataaatataaatataaatataaaaatagatattgtaatattatattaaaagggggacattattaaaaagcaaattattgtagaaaagttaacagagaggataaacaagaaaaatagcttaattctttttattaaatgaaatatcaaagaatccaccacctaaatttgattgaaagaatgaagatgaattttgtctttgcattgcatttgatctaatttgattcataatttgcttttccttttgagcttcagattctgtactgttttgagtttctgcctttggagtgaacattccgtgtatgtatgtgtgtgttatagagatagatagataagatttgtctggtaaaagaaatgaaagaaataagaccaagaataaaataaaatagaacaaattgaagggatagattaaggtttaaataataaaatcggaaaataaataaaattccagtaaaccgtacagaatagaataattttttcaaattagtcattaattgtgaaatttttttattttatttttcaattactccgataaaagcttagcggtaaataaattatgaagaagaagaagaagtcaaaaaaaaaaatttatgtattacgtaattaacagacgcgacggtctcggctatgattacctttattaattgggacatttgatcctaaaagagtaactactatattttagccgcctctctatggattattgtaaatttggtaatttttcattgactcattttgataatttacgataatattgatgtccattttttaattgattggatcaacttctcttctctttcttttttatattttttttttatttttttattctctttttcttccctcctttcaccacccaataaatatacaatggttaaacaagttttattattaggttcaggtttcgttgcaaagccaactgttgatattttatcaaaacaagatgatattcaagttactgttggttgtagaactttaacttctgctgaaaaattagctgaaggttcaactgcaaaatcaattactgttgatgcaactaatcaagatgaattaaattcaattgttaaaaattatgatttagttatttctttaattccttatatttatcatgcaaatgttgttaaagctgcaattgcttctggtaaaactgatgttgttacaacttcttatattaatccaactttaaaatctttagaaccagaaattcaaaaagctggtatagttgttatgaatgaaattggtttagatcctggtattgatcatctttatgctgttaaaacaattgatgaagttcataaagctggtggtaaaattaaatcattcctttcttattgtggtggtttaccagctccagaagattcagataatcctttaggttataaattttcttggtcttcaagaggtgttcttttagctttaagaaattctgctaaatattttaaagatggtaaagaagtttcaatctcatcagaagatttaatgtcaagtgcaaaaccttattttatttatcctggttatgcattagtttgttatccaaatagagattcaactacttataaagaattatataatattcctgaagctgatactgttattagaggtactttaagatttcaaggtttcccagaatttgttaaagttttagttgatatgggtttcttaaaggaagatacaaatgaaattttttcatcaccaattccatggaatgaagcagtttctaaatatattggtgcaaaatcatcatctgaaattgatataatttctaaaattgatgaattaactaaatttaaagatgaatctgatagagaaagaattttagctggtatgaaatggttaggtatgttttcatcaaatttaattaatccaaagaataatccattagatactttatgtgcaactttagaaaaattaatgcaatatgaagaaggtgaaagagatttagttattttacaacataaatttggtatcgaatgggcaaatggtgaaactgaaactagaacttcaactttagttgattatggtgttccaggtggttattcatcaatggcaaaattagttggtgttccatgtgcagttgcagttattgaagttttaaaacatcaaggtgcattcgcaaaaccaggtttatatgctccaatgacacctgaaattaatgatccaattatgaaaacattaaaggatgattatgatatttacttaactgaaaaaactttataatcttcgtatcatatatcgtatattgataaataatatttacagtaataatctcttaagtgagggtatagataataaagaaatttcattaataatatctattatcagaacaagtcatctcttcttttaggtaagacaaatgttcaagggtataagaaacatagcatcagagatacgtagtgagatatcatctgatcattcatcacaatcacaatcacaatcaccatcaacttcaagaactagaaggtttagaacaagtttagatggtggcagtagtaataatggtaatacagaaaaagttcatcattttaggaaatataagaacaaaactgaaattgaacaagatggtaatacagaggatgatacagttgttaatcgtgcattaattaagttttataaacaacagggtaaacaattaccttcattcttaatgggtaatatactacaatcacaatcaaaatcagatatacaagtacaatcacaagtacaatcacaagtacaagtacaatcatcacctccaccaataagacgtgcaactacagaactacgtaatgatcaaatacctattagaagacaagaaatacagcaatcaccaccaccaagacagaaattacaacattcaatgacacaacctgcaattgaagttaaaaaaactgatattaactcacaatcacaatcacaatcaccaccaccattacttaagagaaacactagtagattccagagtagattcagtggtaatagtagtagtacaactactggacagtcaaacagtagattcggtcgtcgtgtacaataagtttaagagagggtaacacagtaatttttatagattttttatttttataatacagtgagttataaatttattgtattgttaacaaattaggtgtcatgatgcaactgggtttttgttgttgtattgcatttcttatcagtagtcatgagtaaagatagtgaaagtaagggtaatgatgatatggaaagtattttacaactggataatgtagataatgatgaaatgaagggtaataatgcatttgctgatatgggagaaattgtagctaaggaaggtggtaatggtggtgataaagttgataatggtgatactggtgataacaataataataatgatgatgatgaggaggaggatattgatagtaatgtacttttacaaagtttaaacactgatgtggaaaagtatcataagaaagttcaattaaagaagaattttgataatcctaatcctaaattaaatccaattattcaaaatgaaaataacattgaagagagagtagatgataacaatgcttctgttaaggagaaaaagagaacttttaatgtaattaaagacactgatgaagaaaatggtaatggtaatgataatgttagtaataagaaacattcaaagggtaataagaaatccaataattggacaaaaattgaggatgatgcaattgtttattataaagaagaaatgaaatattcatggaggaaaattgaacaattattagaatttagacatacttggcaagcaattcaaatgagatatttaagaaatcataaatcacgtaatgaagaatggtcaagatatatggaaattaaatttgttaatgcagtacgtaaagattgggagaatagatggaaaaggattgcaaatgatttaggtaatagtaatgaatttacaattgagagatgtgttactaaaaatattgaattatgtaaaaaaattgatttcccatattattcatcaatttttgaaaataaagaagttttacaaggttataatggtaatcataatgatattaaagatagtgaagctcataaaaaattaatgttagtttatatgggattagatgcaattacttatgaagatagtgaaaatgagaatgagaatgagaatgagaatgagaatgagaatgagaatgagaataataataataataataataatgataatgaaaatgatgaaataatcaatgttaatgaatttgataatgataataataatacattcagatgataaatcaggtaaaactttaaaatcaaacaataagaataaagataaggaatcattagaatcattaacacatgataagattgcagctgagattgttgctgcagttgcaaatagaacaaatcagtaggtataatataagtaaaagtgtttattaatagtaaaaacagtaattatggaaaaagtttagtgaggagtatttatatttgttcaccttatcatattcttttctttctttcttttcttttctttgcacattttctgctggattgttggttttatgccatacaaagtatgagaggtttaaatagagagatgaattgccctcttgcagttttatttttatcttcattctgttcctttttctatagacaatcatgggactgaatataattttcaaacaaaaagatatgacagatagggagagcaaagatcttttagagaagaatggagttgttatgaaagatgaaagtaattatcatcgtaagaaattcaagtttcaagaatttggtaaatttagtgaagaacaggcaaagaataaagataatacattaaaaccaataataccaaattcaaatacaagttatgattatgatgaaaatgatataaataaaaattcaaatcatggttatggttttgatccatatgcgggtgatggagatgttaatgatgataataatactataactgatggtagtgtccaatagaaataacggagtacagacttttcagttacaagaacaaagacaggaaactaaacaagaattcgatccttatggatcgtatggcaatgaaaatcaagataccgatttaaatacatatgatcaagtttatgattatgatgaatttgaggaagaagagctggatgaagatgaagaagaaataaggagaatacaaagacaaactaaagatcttcgtgaagatacagtgaatttatcacgtacattagttgataatttaggtcaagctaatgtaacggcaacaaatactctaggtgttttaggaaaccaaagagagaagatttatgaaatggagaataatataggtactatgaaagttcaacaaagatttgttgatgatcacgttaaggaattagaacattataatcgtagtttatttcacattaaggttaataatccattcacaagaaattccagaagaagagctaaggatcaagcatttttagcaatgagacaggaagatcgtgcaaataaggataaactaaataatgatctatatcagtcacagagagctataatggatcaattagagattgatagttttaaatcagaactaaaagataaatatgatcatgatcgaagagtacaagaggctttaaaatatttaacaaatgattatgactgaagaggatgagagaatgagaagtagagtttgctgccaactgttgaacatgcacaaaaattagctttaaagttgaagaataaggtacagctaatgaagtagtgaagttcaacaacaaagtgaagatttgaaacaagttggtgaaaatattgatcatgtggatgacaagattgtgatgaccacaagaaagatacgtaggtatctgaaagtgtcaccatatatgataaatatcacttagcaagttgaaagttctctctactctatgtcataattcaatgtaaaatatttattattaaatcctttatcttttataccctttatagaacgacattaaatatagacttttcattatacttactacatacctccaatcccttgatctttgtagcattcattacatttatttatatcatctactgtgttatcattatgttaatgttctgaaattgtattacgtaattttcttgatttttacattctcggaacaggatttatcatgagaggttatttatagagggagaagaagtggttactttctacgtttccatttttatcttgtttctttttctgtagacaatcaaattaatcattcaatcatgggactgaagaaattttttaaacaaaaagatttgacagataaggagagtaaagatctcttagagaagaatggagttgttatgaaagatgaaagtaattatcatcgtaagaaattcaagtttcaagaatttggaaaatttagtgaacaacaggcaaagaatcaagataatacattaaaaccaataatgccaaatttgaatacaggttatggaagttatgaaaatgatatcaatcaagatgaatcaaatcatggttacggttatgatgaatatgcaaataattttaaaaatgaaagtactaatagtgataccaataattatggatattctaatgataattcttattcatataattcatattccaataattcatattccaataatacatattccaataataatacaaacacatattctaaaacatatgaacgttcaaatagacgtgcacaaacaaatgatataccatcaagaagaggaaagataaataattttagtacaacatccagttaccatccatcagcatcagcatcagcagcaaccgcagcggcagcaacatgcgacaacgacagcaactgcaattgcaggtacacttggaagaacatccactgtttccactgctaatccatcaaatggatactggttatgaaccttcaattcatagtactaatacatcaaatacaaatggatatggattcgatccatataatgatactgaaattacttctaagagtacaaatgttccagaacctgtgtctagaacggagactagatcaacatatgatccatatgcacccggtgaggaaccatatgcgggcgataataatgatccatatggaggttatgatgcatatgatgcatatgcaggtgatgataataatgttgaggatattgataataatactataactgatggtatggctagtataaataatggtttacaagctgttcaattacaagaggaaaataaacaaagacaggaaactgaacaagattttgatccttatggaccatcagctgaagttcaggatgaacaagagtataatactgaagatatggatctaaatgcatatgatccagttcaacaacaatcacaaccatatgatgaagatgaatttgaagatgaagaattagatgaagatgaagaagaattaaatagaattcaaagacagactaaggatgttcgtgaagatactgttaatttatcgcgtacattggtcgataatttaggtcaagctaatgtaactgcaacaaatactctaggtgtttactggtaaccaaagggagaagatttatgaaatggagaataatataggtactatgaaagttcaacaaagatttgttgatgatcactgttaaggaattggaacattataatcgtagtttatttcacattaaggttaataatccatttacaagaaattcctagaagaagagctaaggatcaagcatttttagcaatgagacaggaagatcgtgcaaataaggataaattgaacaatgatctatatcaatcacagagagcgataatggatcagttgaagaacgataatgtgaaatctgaattacaacagaagtatgattatgacagaagggtgaaggaggcatcgaaatacctaactaaggatcactgatgaagaggatgagagaatggaagccgagattgctgcaaacgttgaacatgcacaaaaattagctgcaaatttaaagaacaaggcacagctaatgaatagtgaaattcaacagcagaatcaagacttgaggcaggtaagtgagaatgttcgatcatatggatgacaagattgtgatgaccacaagaaggatacgtggtatttgaaggtatttataaaatgtttaaaaagagtttaaaagataataaaagtaaagtatatccggaaatgtatttccatacttccgaaattattcacagccacagttgattatcagtggaagtacttaaactggagtaatttccctagttattttccaatatattgttttcacttcttcttagacaatgagtactgctgtcccctgctgagttctataccaatctgggtaaatccggattgaaaatctctcgtattattgtgggatgtatgtcctttggtaaaaaatattgggctgattgggttattgaagataaggagaaagttttcacaattctcaagaaatgttatgataatggattaagaacttttgatacagctgatacatattctaatggattctctgaagttttattaggtgaatttattaaaaaatataatattaaaagagatagaattgtaattttaactaaattatatttcccattagatcccgatatccctgattttacagctgccaagagagcaactatgcctgtttatgaatatattaatagtcaaggattatcacgtaaacatatcatggatgcagcaaaggcaagtaatgaaagattaggtacttatgctgatataattcaaattcatagatttgatccaacaactccaattgaagagacaatggaagcattacatgatattgttaaattaggttatacaagatatattggagcatcaactatgaaaacgtatcaatttgttatgatgcaaaatgtagctgagaataataaatggacaaaatttatttcaatgcaaaattattttaatttactctatagagaagaggaaaatgaaatgatggaatattgtaagttaactgatgttggaattattccatggtcaccgaatgctagaggtgttttaactcgtccttatggtaatgttggtgaaactaatcgtaatgaaaaggatattcatcgtatgataaaattaggattagatgttttaagtgaaagtgatcaattgattttgaaaagggttgaagagttagcaaataaatataataaatcaatggctattatttcaacttcatatgttttaagtaaaggttattcaccaattgttggatttagtaaacctgaaagagttgatgatgcaattaaagcatttgcattctataagaatttatcaagtgaatgatattgcttatttggaggaaccatatgaatccaaaccgtggacttgttaagtttaagtagttgtaacatcatgtataatgaacattagataagactgtactccgaacacggatattaattatcattacgatacttacgtaatccttaaattcatagtgaaaatgactcctcttatcagcttgacgtaatttcttttttttgccactgtggagtgttattattaagatgggatctatactgagttattaattttatctcttttcagttgtttattttatcagacacacacttccaacgatgattccacaggccctacgtgagcttgtgcgggtctcacgacgtactgccagagagttcaaggaagttcttgaagaacttggtgaacttataggtgagaaacaattagagcaaaatttacagagggaacgtatccctgtaagaaataataatgaacatccattatctgcagctgctagacgttcacgtcaaagtggtaataatagtggtaatagattttcaagtacttattcaggtcatttctcaaatacaagaaaattttcaactacaagaaatattaaagcaaatgttaaaaatccattatttaataatacctatgcttcatcatttcaaaatactgttaaaagacgtacattaaataatagtatctcattatctaaaactctgagagctgcagtttatcaaactcaacctttcaaatattcatcatcttataccaaaagaccatcatttattagaaattcaaatgttgttggatcaagtatgtactctcatttcccaaaacataatgcgagaatgttttcaacttatggaccaaatatgactcatcaagttgttgaaaatttaagtcaaagtttaagaatgttctttcttaaaggtgggaaattaggtaaagattgtacgtcaacaaatagtaataattctattgacggaaatatcggtaataatcatgtttattatttatctagagataatgaatctattgctaataatgatttaagattagcatctaatgtaggttttgatgattatgatttaggttgttatattgaatttaatttatctaaaactattgaatcatcaaattttttcccaaattcaggtattttcagtgatgattgtaatgatgatttagagaaaattataatgtcaaatttagaatatcaaatgaaagtttcaaaggatattaaaaaagttaaggaaaatattggttcaacaagttataaatttgataaagcacgaaatcgattgcgattttattatccaaattgtgatgttattaaaatggaaaatttattacaagaatgtgaagtgacaactgcaatagtttataaaaatgaagaatctgataatgaatctgaatattcaatacctgaattggaatctgttaattcttattcaagtttaagttctgcatcattatcatctgaattaaattcagttttatcatcagatagatatcaattaattgaatctattgatagtgaagatgcaagtgcaagtgaatcagtgttatcttcagtatctagtgattattttgaaatcagagcataatcttattgatttttttgcattttatatccattatctttcatgtttttttcttttgtatcttttcatattattttcttttatttggttttctacactatgttaaggtgtttatctttttaataaatctttatctttatttttatctttatcttttatttaatcaaacaatctcatatatccaacaaaacctattacgtaatgtttcttgtaaaaataatgaatgaataaagcaaaacaaaaaaagattcagagggcattcaggtgattcattaatattgattccgactagggctgtttgaggaataaggaatataatgagtgagtctatgaatagtaagattgacagcaataatgacagtattgatgatttaaatgattatgaaccaaaagaaagtaatgttattcaaagtgatgtgatcggaactgatgcagttgaggcggaagaaaaggaaggagaaggggaagataaaccggttgaagaaaaagatgaagaaaaaacggatgatatagctgagaattcagtgaaggaagatgaattggaaggtaaagataataatgaagaaataattttcaaagaagaaccaattgctaaagaggacgaaataactaaagatgaatcgaatgctgaagaaaaaattgaagaagactcaattgttaatgaagaaccagaaaaagatgatttaattgttaaagatgaatccattgctgaacaagaagataacgctgaatcaattgttaatgattatacagagaaagaagaatcaatagccgatgagaaagacttaaatgtcaatgatcaaccaattgatgtagaagatctcaaagaagatgatgaaatacaatcaaaagaagaacatattaatattaatgatatggaatcaattgattctgaacaagtatcgattattcatcatcttaaagaaacttcaactaagatagaacctgaagtaaataaagaggaaccaatcgacgatactattacagaaacaatcccacctgttacacctacatggtattcgtttgaagaaagtaattctcaaaaattcattgaaactagtgaaatactttcatcaccaccacatttaaatatggcatacaatagatatcaaaataatgaacatgaattagaaatgaaggataatgaagaaagaattgaatttgagaaaggacgtgataatattaagaaaactttcaatgaaattaaaattggtagtgaagataaaataccaatcaataaaatcaattgggaattttggtcagaagttttcaataattacaataatattgttaaaaataaacagaatgaattaactgaaaatataactaatggtataccaattgaaatacgaggtatggtttggcaaattttaagtgattcaaataatatcaagttaaaggaatattttattaataataagaataataaaagttcatttgagaaattaattaaaagtgatttatcaaggacaagttttattaaaaattcacaaataagagataaaattgatgatttatttaatataattaaaatttatagtttatatgatttagaagttggatatacacaaggtatggcattcataacagtgccattattaatgaatatggaaagtgatgaagcattttgtttattagttaaattaatgtttacatatggatttagggatatgtatttacctgaaatgccaggattacatttaaaaatatatcaatttgatagattattggaggataaattacctttattatttgagcatttgaaaaatcaaaaaattaaatcatcaatgtatgcaattcaatggtttttaacattatttgcatataaattcccattagatatggtattaagaatttatgatgttgttataactgaaggattagattcaattttaaaatttgcaattaatttaatgattaagaataatgatatattaatgacattaaaatttgatgaattaattgaatttttaaaggataaattatttaaaatttattataatgaagaattgggaaattatgagattgatttatttttaaaagattcaatgtcaattaatatattaccaattacattagagaaatatagtaaagaatttgatgaaatttatagattagagaaagatagggaattacaagttaaagaattacaaaataagaatggattattagttaaagaaatacgtaaaattgaagcaatttatgcaattttgaataaggaacatgttgaaattgccaatgagatggttaagggtaaattagagattagttcattagaggaagaaaataatttattaaatgaacaaattgaagaattgaagaatagattacataatttaacatcatcaagtaatagtggaaataaagataataataataataatttttccagtggagaactaagtgaaggattagataaagaaattcaaaaggcaatggaagtgaatttacaagttatggatgagaatagggtattagaggatagattagctgagttagaggaagagaataatttgttgaagaataataagagtaatccattgaatgtatttgggttaaagaagaaaggtaaattttggtgattggtgatattacgtaagacagcggttatcgacccaacgacgctgggttttaattttttgtaatatttttctttaattttacaatttccaacatgaatttgttaatgatcaaaggatcgatatatacttggtagtgtctctgtagcacaatggaatcaattaatagagttataggaagtgtgagattattttccacatcagctattaacaatgcacgtgcatatagaaatgttgttaatagacaattaaagaaaccagttgaatatcaaattggagatattagaaataatagattatgggttccaaaggaagttagtaaatatccagcatatccatatggtgaaagtcgtatttttaagagaagtgatagaggattatttggaggacaagttataacaactggtaataaagttagtgaaatgggtaatagaacaagaagaacatggttaccaaatgttattagcaagaatttatggtcatcagcattaaatagaatgattaaaatgaaattaacggcaagagtattaagaactattactaaagagggtggattagataattatgttacaaaggagaaagaggcaagaattaaagaattaggtatatttggatggaaattaagacatgatattttaaaagctagagagatgtcaaataaaccattaccatataaatttgaaggtgaatataaagtttattatgaaggaacttataatggggaagaaattaaattaattagaggtaaaagagaaattttgaaaaaattattcccatatgttaaattaaatagtcctgaaggatattcattctctacatttaatattgcacattgtaagaaaagttatgaagaattagttaaagaatgtgaatcattaaatgttgatctttcagaagttaaattgtaaatatattcaatacatgtaacttttgtatagataatctgtaaataaaataaaataaaacaaataaaattcccgaataggaaatataagcgatactgctcaaaagggaaacttatgcgaggatgtcctaaaagaggaataatagccgatataaatggaaaaaatactaagcagtcacagaatggaaaatttaataagaaaaaaaaagtgtgcgtcctatttccacattgggaagccacccgcgcaccacacatatattacttattactggggacttaaggcggttaaggaaaatagagcgagggagaaaaaagaaattcccccgcagtgagtgaggaaattgaaaattttcaattgtagtagtagtaggtagatgtatagtaatgattaatttttcataatgaatattcattttgtttgattatttaattatttttaaaactttagtgtttgtctctttgatattagtttcatttaacaacatataacaatggctgcatctggtatcattcttggttcaaacaaaggtcacaaagtcgaagcaaaggctgttgtcactccaagacaatcatataagaaaggttcaaaatccaacagaactacatttgttagatcattaattagagaagttgcaggtttagcaccatatgaaagaagagttgttgatttaattagaaattctggtgaaaagagagcaaagaaatttgcaaagaagagattaggtactcaaaagagagcaattgcaaaagttgaagaaatgagtaatattattgctcaatcaagaaaacattaaattatgttatagattttttatgtataatataataaatataattataaactaatataatataatataagttaatcatctttgttaaatagatatgatagtcaagtaagtaaaggtaatttaaggtataagtatactttattaattaatacgcgcatttaattggttaatttagtaatagtaatagtaatagtgttaatcatcatatcgtaggtttcttctagaggtaatgattagacaattatcaaagattcgtataagattatattctacaattggaaatgatagtagcaatgtttcaaaaccaccaacttttttccataatgaatcaaatttacctgccaaaattgaaactacaaaaccaactacatctataataccaccaaagccaatattcaataatgataacaatgataacaatgataataataacgataacaataataaagacactaagataaattattttgatagttataaagaattttgtaaaggtattgcatatttaggtattggtacaagtattttataccttatacttgaacaacatgaaagggttgaagagagtgaacgtaaaatgacattaatgagaaagaaacaaagagaaattgcaaatcaaatggcaacatataagagtaaattaaataaaattgcaattgataatggtaagaataatgttatcttacaaggtaaattacagatgcatattgcattattaaggaaacaattacatgataataatattgatccaataagtatagatgaagcaattagacaatttgaagaaaatgttaaaattgatattgtatctaataaggtagagttatggataccaggtgaaagtgaagtaaagaaatatgtaccagatacacatgaatataagtaaataataagtaatagtttatatagagaaaccctcaaatagaggtgaaaattaaattttgcactataaaaggaagtgattttccacttttattttatataccttctcttatgaacctattttcttttggtaacaatgttttttaacctatagacgcccattagagttgcgatttagtattcttcaattgctaaatagtgctgtgggttagtcttatatcaatatgggtagtgatggatttcactcaagtttgaaacggcttttaaatgtcgtgtcttgactttctatgtcttgactatgcggtccctaacttacatttcatatacgtagactatacttaatttagtaaatttgcatcaattttctccatttctctttgtttgattttaaattgtaataatgtaggtattggacaacaaggtgatcttgcatcattaccatttgtttgataaaaattttgacaacatgaatataattgatcaattaatgcagtacatttactttcattataattatttctctttaaacagttttgaattgcacatgcatgtgatttacatggatcaccacagttgtcactaccactgtctttattgttcatagtatatgcttaaagtttaaaagaaacaagtgtcaggtaaacaatacttagctaaggcactaactaattctcaaaagggtaatttgtgtcagcgcggcaaaattctttggaaaacttcttttcttttgcattgacaagactttgttatctttaaaatgactcttttctttcaagagaagtatacataacgagacacttatgataggactgttaacaactacattaatagaatatactccaagtccattacgtgaaaaattatcatcaatatttggttcaatttcattctcttgttggattatattaatgatacctcaattagttgaacaatggagattgaaaacagttgatggaatttcaccaattttccttattatttggtcaattggtgatatacttaattttattggttcaatatgggcaggtttattacctgaagttatattaattgcttcttggtttttatttgctgatattttcacttttgcattttatctttatattaaaattgtctatgataagaaaagaattgataaaattgttataatagagcaaggttatggtgcagttaatgatgaagaacatggtgagaatcaacatcatgaacatcaacatcaacatcaccaccaccatcatcatcatcatgaaagacgtagatcttcaactttagaagatgttgtttatgaacctgaaaatcattcaattttcattaaatatatcttaccaattatattagttatatcatcaggtattttcggttcaattttatcaccaaattctaataattcaacaacaatattaacttcttcagctaattcatataatgtaccacaaatattaggttattgttctgcatttctttatttaactgctagattaccacaaatttatcataattatcaaaaaaaatcaacaaagggattatcattattatttttccttttcacaatgttaggtaatataacttatagtttacaaattgtttcatatagaaatgattatgattatttaatgttaaatatgagttggttattaggttcatttggtacaattttagaagatattataataattttacaattttatttttatagagagatagaaaattgaatatataatacttttatggattaaaactaccaacataagtccaaccaccaaattgtttttgaacactttcacttaaataatcatcaacaactgaatccattggtctttcatcagtaaattcagaacttatatttgaaatatccattgaatctttaactaatggtttatatggtggtatataacctttattatttaatttaatccaatcaatatctttgaaaaattcatgatttttaatttcttcaactccattaatacctaatcttttatttggatccctatttaataaatttttaattaaatcttttgtaatattatcaatatcatttggaaataataatttatcatttaaaatttttttatacataattgaaacatcttcatcataaaatggtggtaatgatgttaacatttcatataataaaatacctaaagtccaaaaatctacaactcttgtataacctttatttaataataattcaggagctaaatattctggtgtaccacaaaatgtatttgtcttttcatttaatttcatattaattttacataatccaaaatcacataatgcaatatgaccttgataatcaagtaaaatattttcaggttttaaatctctataaattatatttaatgaatgtaatgtttcaattgctgataataattcacaaatataaaattttgctctaattagtgaaaattttcttgatttttgtaaatgataaaataattcacctccattaataaatgataaaataaggtataatttttcatttgattgaaatgcaaattttaatggtacaataaatggtgaattaactttacttaagacaaatttttctgctaatgtatgagtaacttccattttattaacaatatgagatttcctaattgattttaatgcataaattttacctgtatctttctttttaacttgcataactttaccaaatgatcctttaccaataacttttaataattcaaaatcatcaattgataaaggttttgaatcttttgttaaaggtttaaaatctaatgttaaatttaatgaaccaattaaattatcatcagtataaggatttttcaaattaatccacttatgattaagtaaacgagttggtgatgaattatcataattagaattagaattattttcatttaaatcttttaatttacaaataattgaaccaattaaatgatcttcttgtttatttgattctaataaagaacctggtattctaatgaaaagttgaattgataaaattgaattcattggtgatgttatatcaaaagttgtaactgaattaaattttgtatttgaaattgtattaccaattgaacaaattctttcacttgaattttcaatttcaataattgcataaactaagttatattgagctattgaggaaagtgatgatttattattattattattattattattatcaattgatgaattattaattcttaaagttgatggtaagtaataagataaattagtatttgcagcatcatctaatgaatcatttaataaattaattttatttaataattcagtttcattaatattttgacctaaatttgctaatttatttaaaatttgtttattaattcttaaaggtacaggtatttctaaatcttttgatgaataaattttaattgttaataaacctggtttcattttattattttcaactgttttaggtaattcaccattaataattggatcggtattatctaaatcatgtagtattaaagtatcattatgatttaatgaaacattttgcagattatttgaaatagtgtttatattttgactattattattatcattattaatatcatcattaactaatgttttacgtggatcattattaattggagtagatggagttgatgttgggatattatcggattccacggattgtgtactatcatcatcatgtttcgatttgaacaacttcttccagtttgacatggttattgtatattgattgatctaccctttagaaagaaataaacatgctaataacaggctaaaatttaaaaaagcgaaaattcatgttatctattatatattaaagggatctggggtgatgttcctgtccagtattctgtactgtttctttatctttttctttctctttaggcaatgaagagaattggacttagagttgatgttgatgtagatgaattggtcaatgtaccattgaatgatggtactaaatgttatatggtttgtaatataagtaatgatattttaaagaataatcataaattactaaatgttaatcaatttaaatcaaatgatgttgaagttaaaaatcatagagttaaatttaataatggtaatggtttgggtaaatataaggatgatgttaaagttattattaaggatgatggtacaattgatagtaaatggattaatataagttttcatacaaagaggaatgaacataatcatgatgaattattaggtattttaaatattaatttaaatgatattaataataataatgatacgaagatgttattagagaagagtaaaactaatacaattgttaaattaagaattggtgtatatggagaaggatatgaacctaaaattagggaagtgaaaaatagaaagagtggtgaaggtattaattatgataaggataattataatgataaggataatgataagatagttaatatgaagagtgaattagagacacaaaatatgatgaataaagcatgtgaattagcaattacagattctagtttattagataaattaagtaatagaacatatagatttacatggcaattaaaatcaagtgaatatgaagaatttacacctgcagaatgtgttaaagatataattgaacataatgggaatggatggaagaaaaatgatgaaggagttgattatattgatataattgaaagagagaggggacaagtgattcaggataaagttgataatagaattgatgatagattatttagtgatgatgatgaatttgatagtgaatatgaaagtggtggtgatgataatagtgatggtgatgatgattataatgataataatagtgaatatggttatgattataatgatggtagaagatatattgataaatattcacatagtgttagacagaaacccgttactgaagcagaggtaagggaagatctccgtagttggaagattagtgtttagctattgtctatactctactctactctactctcttctactctactctactctcttctactctactctcttctactctactgtaatataccatatactacttatataggaataaaccatacataattccgaaaatagtaatccgcactcgggatttcccctgcttctaccaatgagaacatgtctattactacagttgttcttcttgaatacaccttgtttctttgttttgtttcccaactgacaatgtttgcaccaggtattagatcaactaaatcacttacttcatcaatcaatatctctattgctaagagaggtttatttaaaacaattcctcaacctcctggtaatattattggtactgttaatgatgcttatgtaccaccaccttcaaataaattacatggttcagctcattggacttttgaaagatttgtcactattggtatggctccattaattatttctccttttattacaggtaccgctccattagattctgctatggctggtttattattatatcattgttatgcaggtttccaatcttgtataattgattatattccaaaaagagtttatggtagtttacatactgctgcaatgttattattaacttttggtacttttgttgctggttatggtgtttataaaattgaaaatgaggaaaaagatggtgttttcggtttattgaaaaaattatgggttaattaagtaagtaattaactatacatacatacctttatataattataattataactatttattcttcatctgatgattcatcactaatgttattatctttatctttatctttatcgttatctttaatcgtcgtagtattggtactttccttatttgtattttcctctttatcaaatatagaactctcaggcatcctgtgcattttataataatctttaaataatataccaatcttattaatccatttatttcgtttatctaacaacacctttaatgatgaattatttaaattattctcttgatgatgatcactattatgattatgattatgattatgattatgattatgattattatgttccttacgtcttttaggattaacatttaatctccttctataactaatttcaatttgtttatctaaatcatctaatattttcaaatattcttgataagctaaataattttcaactattggtattaatatatttttcctatctttattaatatcaattatatcacttaatttcttaattaatttccttaaatttgttgaaatttcatcatcctgtaattcacttgaccaattttgttcccatgaattattattaatagtttgtttaacattaagaaaaattccaataaattctaattctctttgaactctattctctaattctttaaatgttaaattatcattacttatcttaattggattattaaaattcggtattatagcacttaaaattcttgatgttaatggaccacatgatgattttataagtgaattttcatcaccaagtgctatattttgtttacttatactattatttttacctaatggaggtatctgtatattttcatcatcaaaagtttcatcatctttttgtaaaaatttaatatcatcttcattaaaatctttaaaatatggttcaatatatgaattaaatgtattccaagaaatttgttgtgttggttttggtactgataaatcaattaatggtatcttacctggtaaaaattcagttaaattattttcaggtgacatactaacacctgtatccttttcatcagtaattaatcctaatggatttaattgtgataataattcatccatattaaaatttggtttatcattgatacaattattaatagttaatttatctgtttgtttaagtaatattttaattaaattaatttgtaattcaagtatatcaacatattttggattagttgttaatctttcaattaatggtatagtgtttgtattgttaggaggttctataggagtaattggtttaaccacattaggtatggtattatgattcgtattggtattgatattggtattattattaatattattactattatgattaatattatgacgaattttaggtgttggtggtaatgatgcaggtggttgtcttgaaggtattggaggtaaagaaattggaggtggtaataaaggtggtggtaatggaggtggaggagatggacgtcttggacgaccaggtcttctacgtcgtgttggtggcattgctaaaaggaatgtagtgtattatctatgcatgttatttacagaatatttagtgatatagaaattataaaaaaatacttacttaatcaacaattttttgatttgggatgtattcatttaaccaagaatcagggaattttggctttggcttttccttaatatgtcttgtatctaatggaatatcattaaaatattgaggatctttcttactttcatttattaaatcattaataattgttgaaataaatgatgcattttgtgcaggttctaaaaatctatttgaagtaattgtaattgtttcattaattggattataacgtggacctgaaattaattttaatttatgtaatgaatcattatttaaatcatttaattttttaatatcaattataactgaaacttttgattcagctggatgtgattcacctaaatattttgtatatttatatttaaatggagttacttcattattattataaatttgacgatattttgataatttaggtaattcaaatgctgcctttctattaaattccattaaatctctaaaatcacgtacaatatcttgagcagttgaaggatattcatcaaatccattaggttctaatggatcttccatatattcaccttcagtaatataattatcataatcagtatcagcatctgctttataaacatcagcttcaggtggaaatatatgaattataaataatttgggcctctaatggagattttgcagttgaaagtattgaatctaattcaattttagaaggtttataatttttacctaatttaataactcttgcacgataaagttgttgaataacatttgatggtaatcctttccaaagttgaggatgatgaataagtgatgatgatgttaatcccttgaacatggtcgtttgtttaaggaaaagaattgttacaatatacaatatacaatacactatataccaaaaaaatccaataaattgaaattttggaggaaaatgaagaaatttgatgattatattacgtaaactatacaccattcctcttatagttatggataagttaaggtattggaggagtgtattagagaaggaagagaggagtaatgtggtggagagtatattatgtattatgaatatactagaatcatcaaataatgttatgattgatgattttaatgataaaaatgaagattctgaggagcatagttatgaagaatatgatagtgaaagtgatattgatattgatagtgaaagtgaaagtgaatatgaatatgaatatgaatatgaagattttggattaaatggtgttaaaggtattgataatactataatacctgaaattaatattaatagagagatattaataactaatatatttaataaatgtaatatttcaaagacaagacaaggtacaattttaaaaataatacgtgaatgggataatgaatttaatcaaagtattttaacaaatattaatatcaataataatttatatgatatgttaagaaagcatttataaaagatgtatagacactactaatattagatattaaggttaagactatttctatattgaatcatttcagtatcatatcttaatttatcatcttcatataattgtctccaataagatttatcatcatctgacatttctttccattgttttgaaatttcctttgcaatatcagtttgtgataatgatgaatctttagctgcaactgcacctctaagatgattataaaataatatataagaagttaaaggtttctttggagcatttggatctctcttaatacgacgttttttcttatttgatccatcatcattatcattatcattatctaataaacttaataatgtattagtctttttactaacatctaatgatgctttacttaattcctttaaagcattaattaattcttcctttgcagttggtatatctgttgacattatgttatctaaacgtgtggggcgggtataatctataatcactactgagggtattgggagtattgggaggaagtgaagagatgcagtgggaaatgaagggaagtgggaaggttgcaggggaaggggaaggtttttttctcacgtcattttttttttttttttgttttttgattcgcgggtaagtttttcattgggttcttagtattttattgacattttgcctaatgaggaagtattgctgattaaaatcaattttgctatctatttatcacatctttctcttagcaaacatgcttcaattgtctctattacatgacttaaatgattccttcataagtgaggatgacagtacggtggataatgttgatgatagtatccttgttttgaaaaaagtttggaaaaataactcaatgaaacattcaaatacttttgaaaatattaattttattaaaaatgttaccacaatggatgttgataatattaaacagtatttagatgatgatgatgaattaaaattaattaatcctttgaagaaagatttaaattatactgatacttcatttaatgaacaatatggtgaaatgatttcaaatgattcaagtattgtcgatttaggtattgtagatcataataatctcaatattaataataatactaatactaacaacacgcctttatataggtataaaaatcccattaaggacataaatgtctcacctgcgagagagaaaatgttacttaagtttgaagaacaaaaggaaagaatgcaattgaataaaaaactgaaagaattacaatttaatagtttaatgaatattcataatgctgctccaattaaagattatccattaatagatcataatgataatattcatatacaatctgatgatattattgataatgtatccatccatacaccaactccggatagtactctttttgaaacttatcaaccttcaccaactaaaattccagttgattattcaaatcatgttttcgataaacctgttgaatttaaaaataaatttaatgataatttatttagtgatgatttatacaaaaatgaaagtgttaaaaagacaatacctgataatccatttattgaacaattatctgattctgctccactaattacagaagttactgaatcagtatcaccaccactacaaaaacaacaaccacaaatagtatcacgtcttttcattagattacttaacattaattcgatatcactaccattggaatcaagaaatgccaaaattcaattgacttttgataatggtattcattgtattaaaacagatttctttgatgttaataatccaattataccaattgataaggaatttgaatgtatagtttcatcaaatttacaattaattataacttttaagattaaattcgataaattaccaatggaaaaagttattacaacaaagaaagtacttattaaacaacaacaagagaaaccaaaatccaattctaaatcatttttcaaaaaattcaacaataaagagaaaaagaataaaattaaaaatgagaaaccattagaacaatataaaactgttgaaacagtaactgagaaacaaccaattgatccacttcatgattatatctcccccgatggttcatttagtaaattgaaaattaattttagtgaatataaagatagggtatcattccatccaacaacattttcattaacttgttataatgaatggaaaaatactaaaattaataaatctaaaattgaaaattctaatccaatacctatttgtaaccttaatttgaaaatgctttacattgaatcttcaataacaaagaataaacaagatacattaccaattagtattaataatgcaattaatcaattaattgaatttaggaaattaactaaaactttccaatttgaaagttttatgaatcaattaggtggtgatgttaatacaattacacgtagatattataaattacaaaataatgaattatttgcatatattgataataaattaaaggcaaagattaatttaaggaaagtaatcaaattagtaattgagccatatgatggattaagtaatggatttaaaataattttccataatggtgaaaatattgaattctcttgtgataatattgaattaatgaataaatgggttgattgttttaatggtgtcattaattttaataaaatttcaaataaggattggttattaaaattagatgattcgatgaaagatgtagttttataattataatagttaaatacgtattattacattagataagataagataaggatgtatttcccttttcggtaattctgccgcggggagaaaagcggttaccggtgaccggactctctcatcggtttacctctttgatgagggattggtatttaaagggtggataagtatgtagtttatgatggcttacttttatttgattatatctatctcttttagcaaacaatgacaatgacaaaattattagtaacacctttagaaaatagtaaatttggtgcaaaaattactttaccagattacactaacgatccatcaaaattaaatgatgaagatttccaaaaattaaataatgcattattaacatattctgttttagttataccaaatcaagaaaatttaacacctgaatcacaacattcattaaatattaaatttgatccatcaagtgcaagtaattatggtcataaggaagaattatttcattctaaaaattcaattttagcaaaagatggtaaatgtgtcccaagaagacctgaagttatgatggttggtaatggtacatttgaagcaggtcatgaaggtatgaaagaatttacattagaacatcctgttcataaaactttccataaaaaattattaactgatgaagaattagcaaataatcaaacaagattttatagatggcatatagatgctgcattatatgaattatcaccacctgttgttacaacccttttaggactggttatacctgaaaactaatgaaaagatgaaaattatttatgatgatgatagtggtgaaatgattgaagttgctaaaggtgcaacagcatttgcatcaggtaaagttgcatttgatttattatctgatgaagataaacaatttgcgttaaatacaactgttgtttatgcacctcatccatatattttcattaatgattgtaaagcaacaagtgatggattaacaattgtaagtgaaggaaaggaaaaatcatttgatgaattaccaccttgggaagaatcaaaattgaaaaaattaccattagtttggacaaatccaacaactggtaataatcatttacaagttcatggatgttgtgtttatcaattaattgattctaatactggtaaaattatttacgaaatggaagatgcaagaaagaaagttcattcaatgatgagacctgcaattagtccaaataatatttattgtcatgattggcaaaagggtgatttatgtattttccataatagaggtgttatacattcagttacaggtgaattgaatgaaaatgataaaagattaatgcatcaatgtaatattgcaagtggttctgatccaaaacttttataattggtttatataagttattatatatagtattctttttaagtatttaacgtcttcttctacgtctttgtttaagtctatcccaatctctatctctatctctatctcctctgtcccaatcacgatcacgatctctgtcacgatctctatctcttatgtctctatctcttatatctctgtcccttacatctctatcctctacatgtctctatccctatctctgtctctcggtatacctttttcaacatctttatcagcttgatctcgtaaatctctcaacattggagttttctcttgattattattattattattattgttattgctattattattattattattattattattattattattattattattattattcataggattaagattattcatcatcattggattcataccaggtacattcatacctggcatattcataaaattcattacaccattaatattcatacccatattattatttaaattttcattaattttttcaaattttgaacaatacattctccaagtaatttcattaaatccataagttaaaataatctgataaatcactacctggtaatctccaatggtttatcctttaattcttcaattgataattcagttattggtatatcattaaatgtaccaattttatttatattaaatccattagtatcatcatttgttaatactggtacagttttaatctgctgttgttgttgttgtatttctgactgtacttgatcttgatcttgttgatttattattgtcggttcagtagttgactgtattgtttctggaactatttgagttgtagttgttggtctaataattggtttactttctaatgatccaattataaattccacatcagaatctgaatctgagtctgaatatgattcagattgtatatctgattgtaattgtggttcttctgacacttttgtttcaattggtatattatttactggagtttgagattgtgattgtggtagtttcctttatttcattattagtttctaattgtttattctctgtatctttatcgttgtctgatccatataggaagtcgtcatcatcagcattcattgtgttgatccactaggaagagtagtttataatcactaatataattgatatacacgttaattcatgcaaccatttaatcaggtaaagtaaaataaataaaaaagcgtcacgtgcgcaatgaaagggttacgccctccaaaaagggtaaaccctcacaaaaatgaaaaaatgaaaaattaaacaaggcagcgcttcctcactaggcgctctctctagtactgactgagtatattgaaaatttaatttcattaatatcatatttttcattaacttatgactagaatttcttattttaccttctgtcttttaatataccactacaactaaggaaaaaatgtccaagagaactaagaaggtcggaatcaccggtaagtacggtatcagatatggttcatcattaagaagacaatgtaagaaattagaaattcaacaacattctagatatgattgttcattctgtggtaagaaaactgtcaagagagattctactggtatttggacatgtaaatcatgtaaaaaatctgttgcaggtggtgcatatactgtttcaactgctgcagctgcaactatcagatcaactattagacgtttaagagaattagctgaagcttaaattaattgttttaattattattatcaatataatttaaatatcaatatataaaatagtttcctaatgtttaattacagtttatcttttcgaataaaatgaatttcaaaaaattattagattagtattatcgatgtagttaatatttagtatggctcttatattcctagtaataaaaaaaaaataaccccttattatagtacagtaaaaattaagtgaaaaagagtagtgcatgcggggtttgaacccgcgaccatcgcgtttcttggagaaaacggagttatgcgataagcataatcgttgtaatacgactataagcacgatgctctaaacctctgagctaatgcacttctcgtataaaatttagggggtcgcttaatatcggtagtggtggggtcacgtgtttgccgcgttttattgggatttttgtcttttatacagtgtttgtgtaatggataatgtcagtagtaaggttttattactagtattaataggttttataatgtttaaaaagtttttttgatataatttttaggttttggtggaaaaagtgaagtttagtaaacaataattctaaaaatagattttacaaaaatttttgtgaagcaacataattacaaaaaacactgtaaacaagtgtaaacaagattaatacatccactaactacacacaacacccatatagcacataccaacctccttgaattgttaataaacccatagaaagcaaccacataagcacacgatttttacacatgaatttcctgtgctgctgataaatacaacttttttttgattttcaccaatacatcgataacttgaaacaaagattagaaaagacttctttactttcttttatcaatctctcaattgacataaccatgaagaaatcacagttgagagctaatctgcttgatgataattcaactttcattcaacctggaggtttaaattctaaacataagtcaaattctcgtgtatcaagtcataatcataatcataatcatgataataatcaaaatcaaggtccacctcctccaaataattatccaaattataattatccacctccacaacaacaacaaccaatgcattatatgaatcatccattggcacaaaataattatcagtatcatgataatagaaattatcaacaatctcaacatcaatcttaccctcctcaacaaccagtatcctcctcaacaacaatcgttccaacaacagccttacccacaaggtctacaaggatatggatatccacctgcacctcaacagggtccacaacaggtaccaccacagcaatatattccaaatcaaagagaatcaaccattgaaactcaaatagataattatgatcgtcaaattgatacagataaacaagataagattcaattacttgaagagaaaattcaaagattagagaaagtacttgcaatgcaacaacttgaagaggagaagaaacttgaagaaaggaggaaaactgaagtaccatcaatgcctattagagtacctacaccaccacaaccaatacgatcaaataatggatctgttagttcattaaattctggtccaccattaccacctcctccaccaccacaaaaattaaacactagttcaaaaaatagtcttattattgataatcaaaatgacatgcaaagattaagtgcatcttcattaatacctactgaaaaatccattgaagatgaagaaacagaaattgatgatgaggaagaagaagatgaagaagatggtgataataatggtgatgaacctccaccatcttatgaagaattagagaaatcaggtacattgacatattcacaatctatttatcgtacaggatttgagaaagcaggttatcaaatggatcatgttacaccaagtatggaaaaagacagtaaaaaacttgaagctttaggtctaaatgataataatgatgataaaaacagtaaatttgaattagatattaaaccaccgacaatgagtgttaattcattaaataaaccaattgttaaagctgagagactaatgtcaaaacgtaaaatacctacacaaattgaagaagagaggaaaccagaattagttaagaaacctactgatgaatcaattaattcaactatttataatccaagggttaaaagtgaaattattggttatattaaatattcaacaaatacatcatatgagacattagctaatggagttattaaacctatattaccatctaaatctgatgaatctattgataatgttattaatagatttagaaaaacaagagaaaaggcattaaatgattataaacaatttacaccaaagattcaattttattgggctattttattattagagacattaagtaaaagtgatgttatatcaaagatgacaattgatggtaagatacgtaaaaatgagatatcattcaagaaactacgtaaacaaagattaatgtttttgaatactgcagttaaagtacttgaaaaattaattcaaattgcacctaatgatacaagagctaaattatatcttggggatatttattcaggtggtattcatccaggattaattgaaagagatgaagttaaaggttataaattattttatgattgtgcaacaaagcaaaatgatccagttggttgttatagagttgcatgttgtcttgaaagtggtattggatgtgaaaaagatattaataaaagtattatattttttgagaaaggtgcaaatttaggtgatccatcaagtatgtgtcaattaggtatgatgcatttcgcaggtgttaatggatgtttacaagatattaaattatccatattatatcataaacaagcatatgaaacattaagaagtgtaagtataatgggatttgatccattaatatcaactagaagtttccaagatgcaagaggtgcacttatatacattagctaaattacatcaaactgataaacaaattttatgtttaacaaatttacaagatgagaaaaccttaaaaactattaatgaattaaagaataataatgtttggtgtaataaatcgaaaacattaaaatattatttagagagtgccaaattaggtcataatgaatcacaggcatgtttaggttattattattcacaaggttatttcccaacatatttatttaaatctgataaagaaagtaatttaaatggtgaacatgatttaattgatagtaggaaaagtatttattggtttagtaaagcagcagctgacggtcatacttatgcatcattaggattagctagatggtatggtagtggtgcaattgatgaaaatggtaaaattatattgaaaaaggatgaacaacaagcattccttatggggtcgtaaggcagctgatggaggtgaattagttgaagcagaatttatgattggtatttgctttgaacaaggatttggagttgaaaaaaatcttataatggcacaaaattattatgaaagaagtgcaaggaaagggtataagaaagcaattattaaattaaagacattgaataaattaaataaataaataaataggtcatttttaataaataaataaataaatagtgaataaataaagactatatactattattgaatattatatgtgcatataaactatataaaactagtttatgggtttgccttaacgaaatcaatacccttttggatgttcttctttaaagtttcctttgcagttgcaaccatttcttcttcaacagaagataaagtacctaatgggtgaacttccttaacaccttctggacctaaagtaactcttgaggagaagaattcaacaccttcagatttgaataatggagaatcaataaaagttggttcagtgatatcagcttcacctgctaaacctttaaggacggaacctgccattcttgcaccagcttgagccattgataaagtagcagaacctgcaccatccttagcttgaacaacttcatcaccaccaaattgaattctgtgaactaaagcatcatattgttcctttggtaaatctttgtgtttagtttgagataataatggaacaatagtaacaccggagtgaccaccaacaacagtgacggtttcatttgctgggttagtaccaacaacttcagacaagaatcttgaagatcttaaaacatctaaagtagtaacaccgaataatttctttggattatagacaccctttgattttaaaacttcggaaacaattggaacagttgagttaactgggttagaaatgattaaaagagaagcatttggacagttttcagctgctgctttagctaaatctctaacaattgaagcattagtattgaataaatcatctctagtcatacctggttttcttggaacaccagctgggataagaacaacatcagaacctttaagagcagttgctaaaccatcattttctggaccataaccggtaacagttgaattagttggaatatgagataaatcagttgcaacacccttacctaatcttaaatcataaagggataattgagtaacctttggatttaatttcattaaaagagataaaggttgaccaataccaccagcagcacctaaaacggtaactttgtaagcatttcttgcagaagaggagaattgtctagttgagatttgtgagaacattatgtggttgtcttaaatgaagcaatttcaaagagattccaatgaaaacaaagaagaaagagtggtagttataagtattaataagtaaataatgttgatcaacgaaggctctgaggaaggtcatggaaaaagtacctcggaagaaggcgaatttttcaattgaggtcaccgagtcgaatccgattttcattaatggtcttttgccttttcatttgactttatgagtttctcttcatttctttgatgaatgtttcttatgggatagtagtctatgtgtgtaagtaggagtagtaatggagaatgttttagggagagtatatgagggagttgaaatcagatattagtggtgtgtttttcttttcataatttagtatttgataacagccgtattcagttatattgttagaagtactaggaatgagtaaattcatcacattaatatgatatgatatgatatgatatgatatcagttcattattatctactgtaataattgtaaagtgatggattatgtttataattataattataattatactttcgatatactgatatcaatatcagctgagcctccggtttctgtgtagtcaaatcatattacttactgtatcaattacagtatgtttcaaaaatggtagtctgtactatatcacattatacgtacagtactgttacaatactgtacatactccataacatacgatacagtatagaacacccaatactacaatgaactccacagaacacgtaacgaaagctcaaatataaatttaaattttcaaccgccaaattaataattttgacaaccctttctttatggctcattcttctttccacaagtcactactaatgtctacttctaccactatatctgagtttcttaactctcaattcaattctatcgatactctgtctcgagtagatactattattactgaaaaatcagctaataataacaataataacaataccatcaccagcactaattctgatgattgtaagttggctcaagatgttatcattcagttacgtgaattattgaataatgtagatgaaaattcacttactgaaatcaataaattattggataaatatgggaatgaaccagctataacatatactaaaatgctgattaaacaaaaattacaaatgattcatgaatttaatattaataaagactttagtgtattattagataaaatttgtgattatgaaatggatgagttatatgataaagaaattgaatcatatgatgatgtttttagtatattatctgattttagaaatcaaattgatgaattttatgttaaatataaagatgttaaattaattggtgatccacataagattaatattgatattaatagactgcatagggaattgaatgataaattatttgcaactattagatctgaaattaagggtagattatataagaaattatcttctaatgttaaaaattgggataatgataaggtagataaacatattgaaatatcaacagatactattaaagagttccaattattaactaaatttcaattaattgcatctaatgttaatgatattagtactttttgggcaatcgatgcactaatcactcaattaaataaaaagttcaaattccattttgagagtgatcatgatacaaatagactggataaacccgaatttgcattcaattatatcataggatacttaaacaataatttaagtactatttccaataaattagcaattcctttcattcaatgttgtaaatcatataatgctataaatggaagtttcagtacatggtttattaaatctattttaccaatgatgaagagaaaattcgttaaagaacttgactatttagttgaaattgataataccaatctgttaagtcattttgtcaatgaattgaaaaaatttgattttattttgaaaacagaattttcatttatacctaataaagatattgataatgaatggtttggattaactaatgaattaatacttgaaaatgaagatgtttggacaatttggttaaaaaatgagaaaacttttgttaataatagatttaatgaaattattgaaatgaatgatgcatttttaattgattatgaaattgttgaaattgataaaacaaaaccaacaaagagttcaattaatttgaaaaatttaattaatggtataacattaaattatcaatcattaccattaaaatttcaattaaaatttttaagtgaagttcaattaaaattattaaatttttattttgatactttgaagaaaggttttaatgcattaaaaggtattaaaaatgttgtaattgataatgtcagcacattagagagaatttgtagaatttggtgttcaggtaaatatatgattgaaataatgaatcaatggaataatgatattatatttattgatctttggaaaagtttaaatgatcaagaagattttgaaaatacatttgaaaaaacattttttgaatcagtaattaaaggttatgaaaaagatatattaaataaaatacccaatcttgtgatgaattactttgataaacaattaaacaaaacaatgaaagattatttccaatccaaaaacaattggactagtgatattagtattaacaatatggattataatgatttacaattaatgataaaagcaatttctaatgatatgtcatacctacgtaaaacattatcaacatcaacatataatgaatggaaatatttactttccaatacaattgcaacttattttgagaaaaatattgcattgatgaacaatttttcaagggatggagcagttaaattacaaattcatgttgattatgtatttgatactttagaactagttaaatctacaactgagggatatggacatttaaaagctataataagagttttagaaacaggtaaagttaataccaaggcaaatgatgtaccattattggatgattatacactggaaatgctgttaatgcgtagggtttagtgtatgtaatgtgtgtaactatatatctgtgtactactataaaaaatgtattaagtaatgaaaaaaaaatgattccagtggatgactccagatgactccagatgattcactcgatgtgtccaacttacattttctcagcatggtagccattccggttcacctttttgctatgtttccctataaatagctatcccctagtttttcataaacttttcttctttttgtacacttcttttttttcttttgcttcatcttcaattgagcaactatgaaatcatttattagatcacttgcaactatctctactactacttccaactcaattcttcaaaaagcattgaatagtaaaattccattaaacacctggacaagagatgaagtatctgctatttttaacgtaccattaaatgatttaatgttttatgcacaattaaaacatagacaattccataatccatcagagattcaattatgtacattattatcaattaaaactggtggatgtacagaagattgtaaatattgttcacaatcttcacataatgatacaggtttaaaagcaactaaattattagatttagatactgtctatgcaaaagcagttattgcaaaggagaataaatcaactagattttgtatgggatcagcttggagagagatgaaaggtcgtaaatctgcattaaagaaaattgctaatatggttgaaaaaattaataacgaactaggtatggaaacttgtgttacacttggtatgattgataaacaacaaattcaattattaaaagattcaggattaactgcatataatcataatattgatacatcaagaaaacattattcaaatgttatttcaactagatcattcgatgatagattagagacaattaaaaatgtttcagattcaggtattaatgtatgtactggtggtattttaggtatgggtgaaacaattgatgatcatattgattttttacatacattatcaacaatggataaacatcctgaaagtttaccaattaataaattaattgcaattaagggtaccccaattgaacaagaattgaaaactaaatataaagatcgtgttttaactttagaaaatattttaagagttatttcaactgcaagattattaatgccaaatagtataattagattagcagctggtagatatacaatgaaagaaagtgaacaattattatgttttaatgcaggtgtcaatgcaatttttacaggtgaaaaaatgttaacaactatgtgtacaggctgggatgaagatattgcaatgttacaaaaatgggggtatgttccaatggaagcatttaaaaaatctaaagcaaacgaagtaaatgaggttattgttaatgaagatatgtctcttgaagttcaaaccttacaataaattgagttttttctctcttaattattatattattattctcttagaaccagtatatagaatgtgaaactctttcacctttaaaagcaaacctatattacaaacactctactgtacagttaatgattgcagatcaaagaatctatcatactttacattacgtaatcacataatttttttttcctttttctcagtgaagaagtcaacttcaaaatgaattggacatcaaaggattgaatatatcattgatttattctgaaagtaatgacaagcgataatgtgttggggaatgggatgcttaagaatggggaggtgatcaaaggggagaatggtgttgctaatgtaaatgtcaatgtaaatgtgagtgtaaatagtagtgtgaaagataataataaactaacagaacaacatgtaaacaatgaaaatattagtgaaaaaaacaatgaaaaggaaaaaaaagatcaaagtaataatgttacacaatctctaaaaccgaaacctagagtgaagaataaaaataatcaattagctaaattacttgaagattcaatgtggtatattgaatcaagtcgtggtaatcgtacacgtgaatcaagtttaaaatttcagaaaaataaggaacaaaaacttgaaaaaatgataaaggatgagatcaacaataaagaagatgaagatgaaccatcacctgaagagaaagctaaattagaggaactaaaacgaaaacgaaaggaaaaggcacgtgaaaaactattggaaaagagaaaattacaagaggaaaagaaattattattaaagaaaaaggcagaagaacgtaaaagattgatcgaagaaggtaaattattacctagaaagaaacctactccgaataaaaatgcattagaattgtttactagtttagatgctgatgatatagattcagattcttattacaaaggtggagaagtagcaagtttacttaaggcatcattatatttcactaatcaggggaaaaaatttgatggttcaagacgtgaggttaaaccagtggagagattagcacaggatgaagaatatattaaacaactggctagatcaacaaagggtaggaaattgaataaaccaaaagtaaagaaaagtacagttaagagatctagtagtagtgaatcatcatatgatgatgaatacgaagatgatcataaggaagaatatcaagaggaagaatatcaagaggaagagtatcaagaagaggaataccaagaagaatatcaagaagaggaaaagaaagaaaaaccagtgaaaactaaaatagtgaaaaaagaaccagaaccaactccagaaccagaacctatttggttcactaatattaatgatgaagattatattgagatttcacaagaatggaaattttttcaagattttgtatatgaaggtaaaaatagtgattttattccagatggaatagttcatgcagcagatataattagaagacaaattaaaatttatagaactgatcatgaagtttataaacttcaaagagttaatttacattatccattttctgaatataaggagaattatttattagcattaccaaaggatgatgttcaatttaatccatttgatgaaattggtaaattaatggaactgacaagtatattatttttacctgatgaagctaaaataaaagttatgaatttagatgatccaaatgattgtattgttggtaaatatattaaagctttcgaggaaaatgatctcgataatttaatgaaatgtataagtgaatataatgaattaattgatgatttaaggaataatggatcaattttaaaatatgttcaaaataagaataaattttcaagagttgcaatttatgaattattaaatcaatgttattccagaagagttttaccagattccaaaaaactaagtaattataaagcattctcaaatgaagtttatggagaattaatgccaagtttcctttcaacagtttataaacaatgtgaattagataataagagttgttttattgatttaggatcaggggttggtaattgtgttattcaagcagcattagaatttggatgtgaaagttatggagttgaaattgttgaaaatgcatcaattttaggtgattatcaattagttgaatttaataatagatgtaaagtatttggtattaatccaggatttgttaaattattttccaaggaatcatttattgataatccaccagttaaggaaattgttgataaatgtaatgttatattagttaataattatttatttgataataaattaaataaaaaagttattgaattatttcaagatttaaaagttggatgtaagattataagtttgaagccaattgttccagctacacataagattaattgggataattgttcatcaattttaaatagattaaagacatcaaaatttatttatgaagaaaattcagtttcatggacatcaaagggtggattttattatataactgaagttatgaatgatattttagaggataattttgttgttttcaaatctagggaaagcagaagacgtgatgaaggattggatggtagaagtcgtagtgatactccattaaatgcttttactaataatgtttaaatagtgtttttgtattaatataatgttaaagttaagttaagttaagttaagttaagttaagttaagtacttctgcacagccagccggacgtgtacgcggcaagcggatcggttcaccgaagagaataggtacagtgaaatggatgatattaaggtggtattacgaggttttcagagtttggaaaggtatactaataaaagatgaatgagaatagatataaacatagattcaaaccctataatgatgatacaagatatacctatagaaatacaaaagaaccaattaataaatgaagagagtgccttataataaataaaagaaaagaaaaagcgatggaaaaaaaaattattttcagaaatttttgacatgtttcactggtagagaggtatactttcaatcttaacgttaattataaactttcttttgaagaaatttcatttaatagccatcacaatatgcacgctaacgaagaacttcaagcactctccgatgaattaagatctgctcttcatcaatatccaaatttcccaactgaaggtgttcttttcgaagatttcttacctcttttcagatcaccacaattattcaataaattaattgttgcatttaaaatttatattgaagaaaatttcaatcaaactattgattatattgttggtttagaatcaagaggttttctttttggtcctactttagcattagctttagatgcaggttttattccaattagaaaagcaggtaaattacctggtgatgtttataaagttggttacactaaagaatatggtgaagatttctttgaaattcaaaaagaatcaattccagaaggtgcaaatgttttaattgttgatgatattttagcaactggtggttcagctcatgctgcaggtgaactggttcaaaaatgtaatggtaatattttaggattttgtttcgttatggaattagatttcttaaatggtagagataaacttcaagctccaacttttactttattacaaggtcaacctgaatcattaaaagaaagtaatgttcaataaataaataactaaataaatagatatcttataaatactttatgctatactatatattgtaaaataaataaatcaaaattctttatttctctatttctttttgaaaataatattcttacctctatcaacaattttcttcttctttaattgtgggatattcatatcatctaaaacttcacgactatatggatcaaatgatggtttcttcttctctttaccatccttacgtccacgtccacgtctatttcttgtatcttcttgttctcccataatacttttattaaaatcaacactaatatcagtaatttcttcagcttttcttttcttactctttgcattaacattcttacgaagtgtaataatttcatcacgttccttaacaactggttttgtatcttcctctatttcaacagtttcctcttctggttcactttcaattatttcattatcaatttcaaattcaacttgtgtattcatatcacgttggaagtattcagtaactgattcaactctttcattgagtgagttagaggtgattgttttaggtttacctgaattatcatattcaattgcaaatattttcttatcagttggtttaactgtgtctatcttttgtactccatttgagttatgtatattttcattataaaattgaaagaaattattaaattcaacttgtaatttattaacatctttaacagattcatagatatcattttcttcattatcatcatctattacattatcatttgaagtactattatcattaactttatcagatttatcgttttcaacaagaattttactaaaatcaattttcttaatttcaataactgcatctttaataacttgtgttaattctttaattaattttctaacataactagaaccaccaaatttagatgcattatttataattgtcataattaaattaacatcaattaattcaacatcaaaattaacattaaaatgattaactaatgaaacaagtacataatcactcattatatatcttgaactttcatcattaattctagcttgattatccctccatttatacaaaatttctaataaaggtcgtttctctaagggtattccattactgaaaattaaatttgtccaaggtaaatctttattataatttaattgaattgaaattttattatcattcaaagagacagaacctgatgttgtaacaacttgagctgaactactcactgataaattttttggtctataagttgaatattcaaatcttctagttgcaaccttccttgatgcatagagagttttctgtaatgcatttggaattttcaataaatcaccatgaattttataaaaaatttcaataaggaaatgagtatctgcctttgcataatctctcatttcatttgataatggacgtattctccaatctgctaattgccatttctttgatgtacgaaattttgcatattcctctaacaaaaaagctaatgaatatttacctaatcctaattgtttacttgcatggaaagtatcaaataatgaaactaaatataaacctaaatcacgttgtaaccatataacatccataaaagcaccatgtaaaactttaataattgaaggatttgtaaaaggttcatttaaaatagttaaatgaggacgtaattttggtgaaagtgggtcaattaaataatctttcttggaatctgttgtaatttgcattaatgatgttataccatgataagttctataatcatgatgttctaaatcaattgcaataactttacatttatttaattcaattaataaatcatctaattgttcaggagaatcaatccaagtagctaagggggagccaacccaaggaattgatttatatgattcattttcttcaactggatttaaaatccattcaggatattcttgattcattatttcataaaaatatggattttcataatgttgaggaatttcatcagttgcatcaattaaagttaatgattcatctaaaggttttaaagcatttggtttaaatttgattaatggtttaaatggtgttgtttcaaaattatttactggttcaaggaattttgtttgaggtttttccatatttggatttgattttggtaatgaacttggagttgtatttcctaatgtttcatctttatctaagtaagtatatccatcatcaaagtcagatgatatagttggtttttttgttgataatgattttaaattattatttttcaatttataatgattatctaaattaatttcaactttttcaagtaatgaatctaaagttttcgataaaatttgataattttcatcatttgaatttgatttgaattttaaattatttgataaatcaggagttgcagttgatgcacttaataaaattgaattcatattatcaattaaattttcattaatttcattacttgaatctcttattgaagattctatacttttataaaaattgatatctttagcattaacagctgatgaatatctaattaaatttttcaaaataggagcataatgatccaacagtttatccatggaactcatactaattgattatggtcttcagatgcagactttctttaaagatcagggcttttccttaatattatatattattatcagagataaatttttcatgttaaagaaaaataaatattttttttaggagaagcgaaccgtacaccaaaatgattgagaaattcaatagatattgtgttaaggctgtaagagtggcaaattgaagtataactttccgaaagatctttcttttaacaaagatggatattgattcaaatactatactagctacattaagagatgaagttgaacttcaagatgcagagttagctgcacagttctatattttagaagattattatgaacgtaaattatggtatcaattatcagaagttttaaaaaatgatatctataagaatgaaaattctaaatcaattagattaagattattcgatagatttattttaagttttagtgaaaagatcaatcaattacaattatgtgagtttttagttttatcattaaatgataattcatcaataactccacaagaatcattagaatatttaacaaatttaaaggaaagaattcttaaattaggtgagaagaaatctcatagttcaggagatgaagatattaatgattttgaaataatacagtcattaatatatttagataatattattgccaaagttaaattagaattaggatttattgatgaagttagtaatataattgattccaatgagaataaaattgataatttaacatcaacagttgatttaagagttaattcaagttattattatattaaatcacaattaatgaaatataagggtgattttaattcattttatcataattgtttattatttttatcatatattccaaatttaaatgaattaaataataaagaatcaattgttaaagatattgcaattagtggaattttaggtgataaaatttataattttggagaaattataatgcatgaaattttccaatatctaaataatgaatggttaaaagagttagtattatcattaaatagtggtaatttaaagaaatttgaagaattaattaataatgataaagagattaaacaattacctgatattatcaataaaattgactttttaaagcaaaaagtttgtattatggcatttattgaattagttttcaataaaccaactaataatagatgtattaaatatgaagaaattttatcaaatattccaattttaaataatgaagatagagaaattgagaaattagttatgaaaagtttaagtttaaaattaattaaaggtacaattaatcaagttaataaagaagttgaaattacatggatgcaaccaagaactatgacaattgaacaaattactagtatgagagataaaatggagatatggaaggaaaaagtttcatcattaagtgattacatgggtaataatggtagtgaattgttagtataatgtatagtgttaagtagtaatataaacatgtatagacgcaatcgaccctttgaaaatatattacataatcaaatattacataatcattccttacgtaatactcttttttctttcttaattcccctttaattcccaattaggtaagtgtaccggatttattgtagcgaataattttatttaagagaaattataaattattagagggaggatgatgaatggaaggcaaataaaataactttattgaattgaaggctcttcttttgattttattttaatttggcttgttttgtttggtgtttctcttgttttatctattttactaacaatacgactacttactatacgtatacactattatatttacattaaattaggttaacaattaaacatattacacatattactcatattaatattttatgataaaaaatttaataataaaaaaaaatgaaaggacccaatggtaaatcagttttacttaatagagcaactgtatctattagttcatcagtttatgatagaagagcattagattgtactgataataaagctttagttaattctttaaatcatttaacttttttaacttcaacttctgttaaagtacgtgatgcaatgattttagatggtgcaattgaaagattaattgaaattttatatgaatgtcatgatccaaagaataattctgataatatcttatttgcttggaaatgggttttatctttacaatgtttagttctggctggtaccagaggtagtgaaaaaatgaggaaaaaattagttgatgctggtataatacctttattagcaactattttagataatcattttttaacaagaaaaaattcacataataataataataataataataccactactacaaataaacatgatacttataatactaatgatacccaaccattaaattcatcaaatttaagtcatactgataatcataataatcataatcatcatcccactcataatgatataaatccattagatactgatataattataaataataatgaagttgaagatcctcaaatttcaaatgttttcagacaaattagaaattcagttcatgatgctgatgatgtaatgttagaagcaaatgatgaaattgataaattattaaacaatagtagaaataattcagattctttaataatttcaaaacctttagctgaagaagaaattgaattgctgaatgtaattgaattagctaaatgtttccaaaaattaagtgataatgatataaataataccaatcttgaatttgttaataataattttaaagatataataggagattttatgtcatcaaatgaattatttcaaagattagaagtttctaatttattatatcctcaattagatccatttaattcatatttaggtggtttaaaggctttagttccaattaatcaatcagttccaagaagttttgaaaatggtttaatattaccatgttgcagatgatgtaatttggtcattacaactattagcatttatatcaaaatatacttatttaagaatcccattatcaaagtacttatcttcataaatggattatcttttagaagtagaaatcatcctccaccattagaagttgataataataataatgatattgatgttcgatgacttaattaatgaatcatcaaactgatgaattatctggttttccttatgataatgataatataaataataataataataataatgctaatatcaataccaataccaataacaataacaatacaaataatatacttacaaataataatcaaccaattgctccaatatcagatttaaatatgtatacatgtaaaatgaaggaacaagaaagactaaaaaatttacaaaaattaagtgataataatgataaaaatattagtcaatgattatttcaaaataattgaaagtgatgataaatttgaaaaaattaaaataactgaaaaaataaggttaaattacaactaaattaaaatatgaatcattaggtaaactaagaaataaaaataaacgtttgtatagggaaaaattgaaaaattattcaaataaatgggattataataattcatgggacgaatttgagacgccagttgaaaaatcaaaattaattgataataatattcaaccatttgtaacattaaatattttcccattagttgaaagatttacagttaaatcattatttcctgatgatatttgttattgggcagcagttgttgttagaaatgcaaatagaagagatgataaaatgggtggtagaaggcaatgtgcaaattttagttgtggtaaatgggaagatcacccaaaacaattctctaaatgtagacgatgtaagagggcaaaatattgttcaagggaatgtcaaacaaaagcatgggttttccataaacattggtgtgtacctgctaataatccaattactcaaacaagtggagggaataatacagatggtaatggtaatggtaataataccaatgttgaaggtagtacaaataatgaagctactaataccactaacaatactacagatggtgatggtgataatgatgaagtaaataatgcaagtagtggcatattatcttacaatagagatgaataggtatactctttttttattttttatttgattctattatacaatttatattatattataaaagtattttttcaactttataaattaatggcattgtttgttccataaacattaaagttaaaacagtatgaggagcaattcttaaaatttgtgcttcaaaacctttatataaagcaccaaaaccttcagatttaacagttttaataaaacaatctaatggacctttatataaatcacccttttgattataaactctagttaagataacatcccaaggattcattacaataccaacaccgaaacctgcaataactgaagcagataaatgaagtgcaggaccttgttcaaataaatcaaattttaataattcatctttagtaaaattataaattggtaattgaacagctgaacctgcaccagttcttaaaattgctgcatcaacaccacgaaataaaccttttaaaccttcatttttataaattgatgataaaccttgataaactgatgtataatgagtttgttcaccaattttaattgattgtgaataagattgcattctagttttaattaaatacattggtgaaccaataattgcacctgcaatacctgaaattgcacctgatattatattaattggtatattttgaattttatttgaattaatttcatttggataaaaaattgaattaattaaatttctagttggttcatataatcctaatctacaaccatttaaacctaattgataaatatatgcacaaactaaacctttttgaatacctttaataccttcatttttataaattaatgataatgcttggaaaggatttttataaatttttttaacatttgcatttttagataattcaccttgtaattgcatacgagttttgactaattcaattggatttgtgaatgtaactgcaccacatgctgctaaaccaccagctataaacccacctgctgttgatattttttgagatgctgattcagtcatttgctaaaaggaaaggaaaaaaagaataaagacttttttcaaaacatcaacggaccgtaaacgattctaatcatcattttccagtagagaaaaaaagaaaagatggtgaaaaaaaaaaatcatatttccgagataattttctcactcactaggaaattcttagcgaggggggtgtattccgtaataacaacttctatcataacttagccttaataccgttaagtctgtatttaacatttttcaagattttagattgtggattccattgattaaattcattaaagacattatcaatttcatttctaccatttggtaattttttaataacttcaaagaataaacctcttgtacaccaaggtaaaataaatggatttgaattattacctaatttagttatatcaaatggtttaaactttaatgattgattaatagcatttgatgatgaataagttttcaatgaaaaatctaatgctaatttataaacttttgaatcattataaattcttgaatgtccaccacctgtaattggacccgccaatggagttgaaatttctttaataaaatcatgatctgaatatccattatttattaaaatacatgataattttaaaattcttgaaaggaatgatggagtatttgatgatgtatcaatatagacagctttgaaaatatttggatgttgaatatgtgaagctaatgcagaataaagaggtactaattgatcatcaattgaaccaactaatataattttaacatcattaataactaattttttcaaactttctaataatttcctactttgtaaactttcgaaattttgaaatttaaataattccattaatgaatcattttcaattgttgaataagctctaatgaaaagtgatttatccataccataaaatggaccaatattaatacctgccatacctaaaattgaaattctttgtaaatttgtatcaactaaaccaaattcaattaatttattcattaatataatactaacaggacaaccttgactatgagaacaaacaaatataaaatctgcctttttaatatcatcaattgaatttttcaaaatttcgaaaaagaaatcaactctatttaatattttaccttccttttctaatgcaattttttgaatttcaactttcatattattctccaatgaccaattttgtattgctatttcagcaacttgagtaaatttcattgatgtaccagttggtgcaccaattaatggtctaatcattttatttgggaaaaatccatgaactccaataattaaaactcttttgaaaactgttggttttgatttaatataaagagaatttgatggtataagtaatgaaggtatgaaattataataaattggaggtttatttaatgattcttcgaattgagggcaatacaatattatttgaaatatttggatcttgaggtttatttatggaaggagttggagatgatgaaacatttgattttgcagcatcaggttgttgttgatgtggttgatcaattggtgattctgttggatttgtagttgattgtgatgtccataatgaccattttgacattgtttgtagtagtaatggtatagaaagaagacttcctctgtataattaatcaatcgcgttgtataagttaagttacagttagaagagaataagggagtttttccttgaagtagagatgaagaggagtatcagtgagtatttcactgtgagtaagaaagcaaagaaaggataatgatgtaaagaaagaagtaaagacagaaatagaagtagaagtagagttgagtgaagttaagaaagaatttattgaatctttagatgaagaaactgttgaattacttgatgaagagataaagtatatacctgatgaatggtttactttattaaaggatgaatttactaaggattatttcattaaactgaaacaatcattgagtaaagagacaggtatagtttatccaccaagggaggatatctataaatggacaaatgacttgttctattgatgatattaaagtaataattattggacaagatccatatcatggacctaatcaagcaaatggattagcattctctgttagagaaggtattaaactaccaccatcattaaagaatattttcaaaggtgttaataatgattatcccaatacagatattaatcccattagtggagatttaactagatggtcaaaacaaggtgtattattacttaatactgtacttactgttaggaagggacaggcacattctcatgcgaaaatgggctgggaggtgtttactatggcagtgttgcagagggtgatggcagtgcagtcggtagttgttattatagcatggggtaaacctgctgagaaggtagttaatagtgttacagatgttaataaggaaggtaaggagggtataatggtattacatggggtacaccctagtccattgagtgcatacagagggttcttcacccaaggtcatttcctaaagagtaatgaatggctgaagagtaatggtaaggaagagattaagtggtaggtaaggtgatgactttgacattgacagaaaataaattttttcattttattttcttttattttaactttttagagtttctgttctgttctgtttcattaaatgatgtatacatatttcctatcctgtttatattgcattactgcattgggtcaattgttattgtcacagtaaccttttttatgtcatcttatagctaaatttattgtaattgtcatatccttttcctatccttagattatattctatcttatttgtttatttatttactatttggctatttatctattatttctatctcttcatttacttctattcttctaaacaaaactaaactccttattaagcaaatgagaatctttagaaatatttcagctacaatagcaactttactcctcttaggtacagctttaacacttttccttacaattcttacaggtggtactcaaacttcaattttaaagaaactgtactggttagaaactgattgttccaaatatcctggtgctccatttaattcacgttgtagatggactaattatggtttatgtgctgttgaaaatggtgaaaatactaattgtactcatgcagttgctgcttatcctttctctcctgataggaatttcaattcaaatgaagatttaccatcatcatttattgatcattcctaattattattattatacaagtagaattggttgggctttcacattaattggtttagcatttgttgttttttcaatgttaccatatttcttacatattttcattccaaatgctgttttcacttcattattttggattatgtacgttttagcaattattttcacaattgttggtatttcattatcaactgctgcattctctagaggtcgttcaaagtttagagatgatggtgcagctgatactaattttggtacaaagacaatggcagttgcttggacttcattctttttaattttatttaatcttttattcctttcaggttcatttgctaaatggactaaaagttcaaataaaaattcaatttcaaataatgataattataattcaaattcaaattatgattcaaaaaatgttgatattgaacaaactccaattaaaaagcaaagtaaatttgttacttggtttaataaaccaattagtggtaataataatgttaataataatccaaatgttacaaatactgctccttctggtggtttatcatttactccagttaatgcccgttcagatgttaaaaatggtttacaaccagttgataattataactaaattattcattataatgtgatacccccatttctaacaatctttcattcaaatatgtgacaattattattattcttgttcgttatttcccacattttaatcttaattctaattttaatactattactaatatcttttttgttattcatatactaatttatcttaattttactctttctttctttctttctttctttcatgatgaaaaatttgaaaaatgaaaaaaaaaactctccgttaattatttttgtttaaatattaatacttttatgttactttaatttgttttaattataattatataatatatatatatatatatatactccaatatcaatgtgttaatgcaattggtttaccaatttcccattccttcaatgcatttttaatattataagcatattttaacctaattgttgtaattgcagctaaatcccaatcattcttttcataacattcatctaatttatttatgaagttcatttatacgtaaattattttcatcctttaatttattaacatcatcttcattaacaatactctctaattgttcatgaatttccatcatttccattaacatttccttatcctcaaattgcatacttttaccaattgtatcattaattaaatcaatacctgaatattttaataaaatatattgtgatctacttaatggatcatttaaagttttataagctttattaataattgatgattgttcatctttattactatttaaatcaggatgtgaaatactctgtaattgacgatattctttccttaaatttttagtatttaatctgaaaacatcaattgcattattcttctttatactattggggaataatgatatataatcaactactttactactatataacctcctaaacattgcctttataagaggaagtagtactttaaaagatgtattccaccgtgcaccgtgataataatactaagaaatatattatatctagcttttcctcactttttaacaacatgcatgaaaactacattcaaaaactcaaactattattctatcaagaatcagtctgagtttaaaaacattaagtaatccagacaaacatttgaatacagcgtattataaagaaaacaattacaaaaagtgaaggttcaacaattaaagaaccaagtaagtaacaaatttgtaaacagtatataatattatgtaatcaaatatataatttaacttcgtttgtcaaaaaaaaaaaaaaaaaaaaatgaattgtattgaggggtgtttaacagtgtttctgtttcttttgaagagtaaggacaatcatggctggtcatttcggtagacatcgtatgtattaagttatttaatcttataaggattattcagttatactaacatttgttatctaattattatttattatagttttacatgctgataaggaagttgaaaaattcagtgaatttagagaaaatttaattaaacattatagatttaatttaaaatctgcaggttttgcagttttattccttgcagctattcctgttggacttacatattatggttataaatatcaagatttaaatttaattgctgcaaagagagaaaagccaatttataataataattgggaaccaagatcataattccttcctaaaaactatagttaaagctatataatattattcttatattaatttatttatttatttacttctatacatcatcttctaagatatttttaccttctctattaatctttttagcccattgtcgagctaaaattgaaactttcataaatttacgtgaagcatattttttaaaaaattcttcatgaataattggactaattaaataatccattatcattaaaacaatattttggaaatcatttattttataaccaccagaataatgaattaaattattattccaatcatttttaccaatcattttccttgatataaacattgcacttgctgcacataatgatggtaaataaccaataaatttatgatcaactgatgtaatttctaataaatatttaccaattgttcgactattaacatcataatcatcagctttagaaattcttctaagaaaattcattggatttggataactcatattaaaattaagtatttcaagtataaatctttcagcacctaaaatttcatcctctgtaaatgcaccatcagtaacataagcataatttttaattgaaggtgaataaacttcttcatattttgctgcaatgaaaattgcaccagttgctaataattgcaatctatcaacttgaactaattcctttgataaaaatctatccattatattaattgataaatataaagtttcaggtaataatttaaatttaagatgaacttcaactatccaatcaactaaaattgatctcattttaggtcttaagtttctttgcatttgtaaataatttggatctggcatacttttcaattcaagttcatgtaaatattcaaatatatcaccaacatattcacttaccattaatggatcatcaaaatcacctgaatctaaatcatcccaattttgatcatttatttgattccttggattatgtactacatttagttcatttagttcatcagtttcatcgacatcaacatcatcaactatattatttaaatcattttcaactctaactcttttaatttcttgagtttgatcaggttccaataattcaccatcttcatcatctaatggagcagttctctttaatgacattcgtctactttcatctaaaatttgttcatcagttctttccattattgatttatcctcttcaatttcttcatatctctctggtatattttccttttcattagtaactgcttcattattattattattattattattatgattaatttcaatatgttttgtaataaatggtgaagaaatagttgtaccactaatagcagttaaatgactaccttcatcatcagtttcttttaaaatatgattattgttattctcaacaataccatgattgtgtcgttccagcgttacactaattgcattgttagttaaagtattattattgatattttccttaccacctaaaacccttcgttctcttgatgaatgaacaatattcccctccttaacacgggaattgagtgggatattttcattctcatcggcatggatctgcattgtactgtgaagtaatagaaactgagccagtggatactaaaaccaatcaatgccaataccaaccactatatcaacagagtaacagttataaaacactactgagaaattaaaacaataaagtaaaattaaaattttcaaattggcgctctttccccattcggttatttgtttactgacacgttaattatacaggtttaaaaactatacatacttcatagaactacggtaatgattaagctgttcttcactctcactgtactcccagtcactgagcgtctctccggtgaactgctctagttgcatctgtggaggttgtccaaatatcgtaactggatcagtatgtctctgttgttctaataatttctctaaattatgttcttcaaaccaatcattagcaatggatatacgtggtgtatgtttacgtattggttgtaatgttgctcgtgtacttgtttcaagtttgatcttaggtgtagtagtggtggtggatgttgttttgagacttttacgtgttaatgggattttctcacgtttgattgactgtgtttgtattgtgtctctttctctttctctctcttgctttataactttcttacgatccagtttaatagttggttcatccattgatgtgttctctgtaccgtatgtagcattgggtaatgggtttaattcaaatcttctttgattatccttactcagtgtttctcgaaatactgttggtgttccaaatggtttagatataatacctgacgatcgtactggtatcttactaacacgttccctttcacgttcacgttctctatctctatccttatccctttccctttctttctctttattggtatcttttcttcttttcagtacttgtgatttcttacgtgttgaacctaatgttaatggttcaatttgtggcatttctgggaattttatcggtgattgatatggtttactaatagtatcaatcttatttgtcctatccatcgttatatcaccttctgaatcaccaataccattatcataatcactgtcatcactttttgcatcaattaatcttgataattctttaatctcttcctctgctcttaatacacttacactatgttttggacttaatgttttctgcttcgcagcatatgatttacgtatatctttacttattaaatcaaatgaatcttctatattctcagttggtatatgtaattcctcaattatattcctgggtggttcatcaagtatcattgaagttgtagttttcataatttctaattctctagtattatctttcttcattggacttttcctatttggtgatttcaataacataaatgacatatcttcacttccattatcaatatcatcaatttcattcattacattattaatccaatcaatattattacccattgtaattgataatttctccattgttgattcagctagtttatcatgaacatgaacctctgcagctacccatttagaaaacccgggcacatctctcggttgaacagtgtcctctcccctaggccgttgtctgtgtctattcaacgtcaaccctagcatggtaatatactataccttgataatagaagagacctataccagcagcagtagaagctgtagataaaccgcgtactttgtgtcaacatgaaaaataaatttattttacttgcctttcttagcaagttgaaaatttttatctattgtagatgagctttctttttttgcagagccttcattaggggacaatacaatggtttctaagtattctaataatgtcagcactgactctgtggtgcagttacaggatatagttgataatttacaaaatatagagaaatctataattcaaatcaataaattattatctgaaaattcaaatattttatcattagttcaaattcaatcatattcagctacaactaatgatcatactgcattatctgctattaatgttaatttatctaaacttatagaatttgcaaataatcatgcagaacttcattcatctattaaaccattgattttagaactcatctcaattcataatattaaagttttctatagatgtttaaataatgaacattcaactataactaatccagcattgagattattaacaaatattgtttcttttaataatggatttttcgttgatcaattcttggaaacttttgatctatcattgaaatcattagcggatttattcttccctacaaagactagtgttagattatgtaaacagggtaaattccatcttactgttagacattttatgtcaagattttggataagtttatgttcaaatgcttcaccattaactagaaatgatcttttggttaataataaaaaaattaataataattggtttaaatttattaatgaatttgataatatcgaaacaattaaattagttattaaatttattgatgaaaaaatattaatggaatcagcatttaggaaaatgactaaatgtaaaattttaggggattttacattatctaaattagttgatttatatgaaattgaaggtgttaatgatgaattaaatgatttattaattaaattaacaacagatgaatcaaatggtttattatttcatgattatagaacttattttaataatgttcccttacaatgtctggataataattcaacttttaataataatggtgttactatctcaattggtgagaataaatttaaaattaataataaaattatttataatgttttaacattattacatccttggtcaaataatattcatcttaaacttaattatccgaaattttagagaaatgttctgaactttcagctccttatactgctttcctatttcattcaaatggttctcatgatcctaaattaacttctttctatattggtcaaactttattacttactaaaattattcaattaccaattccaactaatttcacaatcatgattaaaaaatttattgaaaatccttcaaattcaacaggtttaactgctaaacatttaatggaaattatttgtccatcttcattaaatagatcatcattatcaaaaggtttaaattctcaacattcattaattcgtcatttatcatctcaattgatcatctctgttttacaaaaatttcataaaatagttaaaagtcttacaattagatggtaattctcattatctcaatattattaatgaaattcaagattctttaattaatctcaaattaccagatgcttcattatttgttggtataactaatgatttattaaaatctgaaaatattaataaattattattacttaattatatgaaaattgccgaatgttatcataattaccttgatataccaattcaattacaattacaaaaaattaatgaagtaattgatatagattcatcaaataatgaaaagaaaatgtcagacttacaattattattatttaatacttatttatcattaacaacaattaattcaaattctcaatctaaatggtggaatcaaacaaatggtaaaaattcattattcacaataattgctaaattaccatatgatttacaatatattgaatcaaatggtaataaagtcattgattcaacattaattcataaatctgttgaagttttaactaatttaatcaatgatactttagtttttcgaagattttaaattaaatgataatatggttatgtattcacaaccttggactttggttaatacaataggttatgtttttaatgaaattgataatgatgcaagaattgcaatttgtagcttactagatgaaactatctctagagttgttaaaacaccttataagtatctagatattattacaaagaaacaaaatggtagagtttcaccattctttgttgctttctgtgaacaagctgcatttgtcgataagtaagtttaaaaaaattgttgatttattcattaaagtgttatctgttcaattattcttggttggtgaatcattagaattgatgaatttattagttaaggagtatcgtggatttgaattagatttacaattatcaaattatgaaaaaagtattgtgaaaaataattttagtatttcaaatactttctccattgttgcatttacaccaattaatgaattaaagaataaattatcaaatattgttctacaatcagatattgaaataattgcctgttttagatagaatattaacaattacaaatagtgattatgaattaagtaaaagtgaagatacattggttgatttaatttcaatttactggtaattatataattcaaaaatattcacaagtttcaacggatgatgaagtagtctattgataattgtcaattatataacagtaaatattggaagaaatctaatggttaattgagaatgaatcaaatgctattattgagaagaaatcaatggttatgttattattgaatgaattattcgaaactttttggaaacaatcacataaaattaaatttagagattcattaagagatattgtttataatatgatgattgaaaataaatttgatgataatgttatgaaatgtattttccgttatgtttggacattatctaatgaacaaattgttgaaatgttattgaaaggttcaaatatgaaacaattagtcaatattgcaattgaaaagaaaattaaattatcatttgaacaaattatgcaaattataaagaatggtgaacaatgtgaacaatttagtgaattaatcaaagattttaaattcactgaggatgaaattttacaaattgttgaattggcaaataaatcatcaaatccagttttatttaaaatacttgaaaatgcaggtaaattagatagtgaaattttaaatgttttatgtttgaaagtaaatagtgatatagtttcatcaatggaaggttttaaatttttacaatttttatcaagatatgaaattaatttcagagaagtattatttgacattgcatatagaaaagtacgtgaaatgattgaaaatgatagttttgattcatcattaaatacatatcttttctcatatagaatttatgcagcaaccggacttttcagggaagcaaaagatttaataaaagaattaataaattcacctaatgttagaaatgttgcatcactaattttctccaaggaaatgactagtcttatatttacaattttcaaagatgatccaattattgataattggttatacagagcagttttatatattactaaaatgtttgcagaacgtgaaagtttaaatgatgaattttatgaatttttgaaaatgtcttcaagaatctgttaatgtatcaatttggaaacatgttcctaaaaatatgcttaattcacaattggaagtcatattaagtaaggattggattaatgatttaaatattttaaaatatagtgtttggttaattcatagtggttcaaaaaatattattgaatgtactaaattaattaatattattttaaataatgaacaaaatggtatgaatggatcaattgaggaaattaaatattatacagctgttttaatttcaatgttaattaagatgaatattaaatcatttgcacattcatatgaaattatttctaaaattttcaaaatgtataaaggtacaattatggcaagtgatttaataatcaaatcattgtttgaagaaattgaaaatgaaaatggtgaaagttgggttcaatatgtaagcaattgggattttattgaggagaaaccgattggtattcctgaattaattattgaaactccatggtatgagtaattcattaactgttactatttataaggaaaaagtattagaaactattaaaaatattaattgttcagaatcaagtattgaaggattacaattgaagaatgattttaagagtaaagatgaagattttagagaaattcaacgattctataaattgaaagatttggaaattaaggaatcacaagttcttatttatgatattgaattcatccttttactaattgttaataatgaagatttattcaagatgaaggaaatcattgaagttaacatgagagcattaattgaaactaatttattacaattagttgtttgtggattagcacatgaatcaaaggatattcaaaagatttcaaagagaataataagttgtattgttttaagtttagatgatgatatcaaaaatttagctaaacgtaaagataaagaaaataaaactaataatattgaagaattacatgttgcatcatttaaggaaagatctgcatttaaagtattatttggtaatttattatacacatatgaatctgaggaaaatattgaagtacctaaattattcataatgatgttatcatatttaattccagttttaaataatccaggtcatttcctatatgagaaaagcatacagatatattttaagtggaagtaaatatagaccatatgaaataccattatttaagagaattatgaactgattttatcaaggatgaacatggaggtggtgaagatagtgattattttagagaacttcaatggattttagataatttaggtgattgtataacatctaatgaagatatgaaaatgatgaggaaagttgttgaagaattattaaatcttgttaaattaccaagtttgaaaaccatcaattattactaaaatttcatatattttgaaaagacttgtaagaattggtggtggtgatatgttaattagatcatttggattattaggacttgttgaaagtggtgaatcaagtgaaaatccatttaaggaagttgcagttttgagtactgttgcaagtggtaaaagaattaatgaatggactagtgatgatgttgaaccattactcaaacgtatctgtaaatagacattatttttatattatataaatataaatattattattattatagagaatcatagaaacattacatcattgtggtaaatcaacaattgtaccaacaatatcgtatcttttttcaaagaatttgtaccaatcatctaaagttttacgttgtttatcatcaagatttgaataatcccaacttactgaaggatcagtatcacttggatcaactgaacttttcccaagtgcacgagatgcatctttaccaacgaatacatgataacctttaccaactccataagctttttggtttgaacttacatcgaaaaccgttcgtttaattccaacatacatacatggattcttctctccgtcacattgagcaacatctttagtcgtgagctttgcgttacctactgatggcattgaatttggaagtttgtccaaaggaaagttgatgaattgttgactgatatataatggattggaacaagaatttattacataatcatttaaaaggttgtaactattggttatcaatctcttaatggaggtttcctttctactggtaactttccttttcagcaatggctacatttgttacagagctctgggaatcagttttcacaccgggtactacacctgcacttattaaggcaacccatggatcatttgtgttgttaattctatcattattggccatgatatacatgagtcgctctatacattttatcaacttattggttatttcattatgtctttggggtgcagttacatggtttcttaaagaattagcaatagctaagagggagaaagaggaaaatggaaaggaaaatgaaggaaacgggaatgaaagtaccgaaataaaggaagttgaagacaaaaagagtatttaaagttatggaagtcatttataagatttcgtatttaattccatgacatgttgtgtaatataattatttgtaattaaaataactctctatgtatatgaaacaaaccttacttctttataacaatggtacttcatacagtatacgttgtacgtcatggatatagatccaactggctaccagagaatgaacaactaccgatcccaacgggtattaagagagatccaccactagcaccacatggtcttgaacaagcaaaagaattagcggagtttgttaataaacaatcacctaaaccacaattagtattctcttcaccattttatagatgtttacagacagctgaaccaactgccaaattattaaatgtaccatttattatggatagaggattaggtgaatattttcaccccaatgaagccgtaacagctgcatcattagaggaattaaaaggatttttcccaattttacataatgaaatggaaactaatacagtagttccatcacttgaaggtgaaacggaaacacaattatttcaaagatgtgttgaattttggaagttatttttacaaagaatggaaactgaatatcctgatattgaatgtgttatgttagcaactcatgcagctactaaaattgcattatctaaagtaattacaggacattcaagtgtaagagatggagaaaaatttggagctgcaacatgttcatttgataaatttcatagaaatgaagatggtaagagttggacaattgatataaatggagaaacatcatttttaagtaaaggagcagagagagtttgggaatttagtgaagaagaagattatgttgatgttttagttaatttagtaatgccagaaaatgaaggtgatgataatgaattacagaaaagaattgcatatagacgtgaaggtggagttaatggtaatcaattgaaaattcaaggattaggtgaaaaagaggttttagcaacaagtaatgatggtacaatggttggacaatggcaaaaacttgttggtagtgaattagtatttgatgaacatggacaatgtgttggagttgttgatggacatattgttatggaaagtggacattttgttgaaaaggaatgggatggtagatcattaagagctagggcattagaattagctaataaattagaaggtaatgaaaagaaagtagatgttaatgaagatgtgaatttagagaaggaagttcaagaaagtgaaccatctgtgtaattaactgtgtaactatacaataatatactatactagaatatacaatacatgcactgcataatgataataaagaggaagatactgttcctgagtcaagatggagagtccactattgaaagaagcgctgagagaagtttttcagagatttttagtattaataaaattgcatgaagtttattgttaaaaattgttaactattttgatgtatttcttataggattaatggaggcagcacgtttgatgggtaagtcttctgctggtggagagagaatgccacctgggatggaatctgcctatatagatattaactatgaactgccaaccaagggtggaaataatggtaataatggtcaaaatgtacctacaaacatctcccaacaaaatcaatacaataatcaatacggttatccacaacaacaacaatttaatcaatctccatatcaaccccaatattatcaaccacaacaacaaatctacaatccacaaagaaatgttagtcaacaatcaggattcagtcagtccagaccaaagcagaaacgtagaaattcaaattcttcaattgcaacatctacagtaaatagttttgttaaaaaacaatggggtaaatttggtggaagaagtggtagaaatggtggtggggatgatgatgaagaagagggtaatgatgatgttaatgcatcagatttagaaattacatttgatgatttacaacatattagaggtgatagagctggtgcttttaatttaggtgattcaactccatatattccaactttaaaatcttctctttcatctaatcctaataaaatgacaggtgaacaatatagaaaattacaaatggcccaaaagaaatctgcaatgatgaatatagccaatagtaataataataacaattctcaacaaccaccaccacctcgttcaatgagtttacaaaattattcacaaaatccaatgaatccaagatatcaagttcaaggaatgcacccgggtctaatacaaggtatgggaccaggtggaccacaaaatccacatatgtcaatgcaaccaaggtttaactacggtcaacatcctaatatgtcaaatcaaagtatgccaatacaaatgcaaatgcatccactttcaaatatgaatatgcaacaatatccaccaaatccgatgggtccgaatatgcaatacggtccaggaccggtaccaggaccaagaccaataccaggcccgggatataattctaatattcctcctcaccagcaacaacaacaaggtccacctggatttaatccacgttcaatgtcattacagagtgaaaatgccattaatcaacgaaattggcaattgaaaaacatgcaaaaggagaatatgtataatcaattaatgacacaatctgaagatgttcataatgcttctgttgtaaataatactgttggttccgttatgggtagtgtgacagaaaatgttgatataccgacagagaagaaaaagaaggaaaagaagaagaaagataaaaaggaaaagaaagagaagaggagtaaaacggataaatcagtagttgaagaaccaaccgctgaagaaactaaggttgatgttgaagaaccaagtatgagaaagttaagtaagattgatttttcacctgttgctgaatcagataatctatcaggggatgatgttattattcatgatccagtattatctaccgtagacgtgaataaaattaaaaagacgagagaaccagttgaatccgttgttacatttgactcgctgaagaatgatgatgttaaacaaagtaaaatgtatgatttgaaaaacaattcaactcaacaaactgttttctattcagcaaccgaatttcctgttgaatctagtcccgaaaaagttccccaaaagaaactagaaaagtttgtagaggatgatgaagatattagtcaaagtacaatcaatgcagttgatatatcacaaatgagtgaatctttggataaattggctcttaattttactccagagatgaatactgatggatttgaaaataattacggatcctatgttgatgataataccaacaaaaaagagaatgatgaaaatcagaaaattgatgattctgtaagatactccactacaactcttggtagtacacaaccgctgcatttaaacaatgatccatcaccaaataaatcaatagttgatatgcatctaaatttgaatccacaaccaacaccattatctccattaagaaaaacaagaaatgctaccgatgaaggatatgaaactcctaaatcaagtaattcactgtccaaagcattatttttagataataatgatacaaaatctgcatcatcactgccaacatctacattcactatcgaacagtgtggattgttaaatgataatacacagttattacaagaacttgaattagttactactgaacttgcactgtccgtttcaagagagatgtcattagaagataatttaaggaagaatggtaaactgcagaatactagtgatgatgacattgatactaaaactgatgataataccataataaccaaagagagtgaaatcaaaggattaaagataaaagaagatgggggagttgaatttgattcatcaacaaagacgccggcacaatatgcttcaataataacttcattagctaaactgttgaatgaagaacgtaagaaacgatatttagttgaagaaatgttaatagagtatcaacaatctacatcattaaatgaaattcaagataaattatctgatgaaagaaaaaaagttcatgaattagacagcaaagtgaatggattaatgaatgatgttagattgcaacagacggagaaagagttattagaggttgaaaaccaagcacttcagcttgaagttgaacatttacagaaaagaaacagtagaatgatatagaaacaattacgtaaacacttgtaagataaattttaatttttttaatgaaccgactctgttgaccgcttgacaacatgaatgtagatttttcataattgctttattgacagaataattagcttttacacaaccaatgtcagacgatagaagtcgtaaaagaggtcgttcagatgaggatgatggatattatccatccaatgaattttctggtgaatatcctcctccgaatggtgattatccaccacaggaaggttataataataataataataatcaaggatataatcaaaataattaccaaggtaattatcaaggtaattacagaggtggttaccagggtggccattatggtggttaccaaaatcgttatcaaaatcgttatcaaggtggatatcaaaataattatgggggtaataataatggatacaataattatccaccaccacagttacaacaacatcaattgcctccacaacaacaacagccaccagtttatgaacatcaatacaatcaatataatcaaggtcaaccacccgttggtgattataatcaagggaatatgtataatcaaggatttcaaccacagcaacaacaagcaccaccgtatgctgatgcaccacaagcatatgcatcaggaactaataatattccagttggtgcaccaatgcctgtacaagccccagtaagggaatcatttgcaggtattggaggtagaaacaataaaagagaatattatcaaccacaagaagaatttaataaagttactgaactttgtagtagattagaatttttaggtgattcagcatttgaaactaaaattttacttacacaaagtagtgaaacattagcattttgttggaatgatttagaatttaagaaaaaattattacaatacttaggagctgttatttatgaaatgccacataaatcagttattttctcaggattaatattattaagtaattcaaaaaatggtgatgttggtaaagattttattgattggttgaaacatagaattgatgaagtgttcaatgcaatggttgaagatagtaatgacaattttacaagtaaaagtgaaatggcacatttgaaatcatggaatgttattgttacattattacgtatgattggattattatcaagtataattgttgattttgatgaaattattacatttaccaataaactaattgaatttgcaattgaattacaaaataataatgaaaatagaagtggattagctgaattaattttttatgaagttgttattggaattccattttatttagttaatgatcaaagtaatgttgaattgaaaaataaactgagggaattaattaataatgcaagcaaatttcaagttaaagatggtgaatgtgaatttgatgatgattattataaaccaatcaatagtaataatggatcaattgttaaaatgagtgatattttacgtaatgtttgtgaagctactgaatcttatttagatgatatgagtttatttatggatgttccatcatttgttgatccattaattgaaactgttttagctgaaagaggtattaaaatagctaaagttgaagcagagagaaagaaagcagctggtgagactgaagagaaaaaagaaaatgatgaagttaataaggaacaagataatgatgatgattataaaccgaacgaaggtgaaaagatggatgaagatgataaaccaaaggaagaaaccaatgaggatgaaaaacttgaaattgaagaacaatttgtcagtaaacattccattggagagattgaagttccatcatatgaagtattaaatagatatcaagatttctgtaaatttgcatcagatgttgataaaatttggttacatccaagatattttattaatttattcccatttgaatcaactagacaacaacttgaacttgaaacttcaccatcattaaatagttatatttcaatgattttgaatgatgatattattaatgtattatttaagttagaatataatagaattacatgttccaaacatttattaaattttcaagcatattataatcataagaaatttgcaaaacctaattcaccattggataaattattaattattaaagatttaaataaaggtattgattttgatttaattaagaatttagaggagagtactgattttgaagaagaagctaaacaacaaatgattaattctgcaaagaaaattcaggaagaatatgagaaaggatttacatcaacttggaaaatggaagaaattgtacttaaaaacattattaacttagcatttttattacctgatagttcattaacattactttattttgaatcattaattgcagatacatgtggacgtaattggacattaagtaaaagaaatgctaataatgttggtggtaataacaataatgatattttaattttcagtaaactagttggtgatattttccgttatttctataataatgttgaagaattagaatttgttaatattaataaattcatcaattggtttttatttcaaattagtaatttcaaatttgaatgggcttgggaagaatgggttaataatattaatgaactaggtgaagcggaacaaaattataatgctagaatttatttcattaaaaatgtgattcataaagagttattgattaataattataaatttattaaaaataatacattaccgaaggaatttcaaagatatgctaatttatcattgaaaactaaggaagaattaattgaatatgatattaaattttttggtaaatcatttgcagataataatacaattaatccatttgattcaattgaaggagaaaatggtaatgggttagatgacaatgaattaaataagaattatgaacattattccactgaagcaatagttgaaaccaatactgaaacatttaaactattcgataattatttatttaatcatgatgaacatccatataatgagaattgtagggatatttatatgaatttagaaaatattgaagcaagtattgaactttttgaagaattaattaataaattacgtgaaagggttgagaatgagagtgaggaaagcaaaattgttgaaaatagtgatgaatatattataacagttataattcaatcaatttgtttaattggatcaagatcattttcagtttttgaggaaagtttaaagaaagttttcggtgagaaattaaaagtttgtgcttgatagtattgataatgatatgaaggaggaatggattattgaagcagttttaagaatttggaataatgaaccaagaattgggttattatttattgaaaaattaaataaatttggagttttagaaacatttacaattattaggaaagtttggaatttaagttctgatagattattaccattaagtgaattatatgttagtgaatttttagagaatttaattgaaggtgaaatttattatgaagaagatgaaagtgatgatacagattctaatgccaatgaaggggaaaatgaagaagaagaagagtatgttgaaaaagttaatgaagaaagttttgaaaaatataaggatacaattaaatttaattttgagattgcaattgaaaagatgaatgaaatgtatattgaagttgaaaatggattagcgattaaagatttaaagacattaaaagcaggtgatgaagattataaatggggtgttaagaatatgtttggattattaaagaaatatattttcaaatatggtaaagatattggaaatgaaggtgaaattgaaaatattttatcaggattagataatgaagagataagaaatgaattgattagactaaataagcaattattagtgtaaatttgtgtaataattccatatattaatagatctgaaatttgatctgatcagatcaaaatatgatcaacttaaggtggctggtgaaatgtgtaggaataaatagccttagaattaaactaactccgaggacgtggcgcatgcagttttcaaaaattaaattgttctagaacttttatatagtctgtactacttacccataggaaaagacggatataagcaattagtgggtaaggtgatgttctaatgggggaaatgtcgggggacaggggggagaagggagttaagaaatttaagaagagacgcgttttagagaaagtgagaaaaagaaaagagaggagaggagagaagaaaaatttttatttttagcaactagttcgcgtgcgcgtttcaatttaaaatattactaagagacttttcgtgatagacgtggtgacgccatattactcactcttttttttttaattttttaattttttaatttttttagttttttttagttttttttcaggtctttccagttttgatggcatttcagttgatctggttgatgatactttcccattttgccccgtttgaaacacttttgcctttcagattgtttattctgctgaatttctgcttgtttcttctgctcatctctgttaatcttttattcttttctcttatttgtagttgtattttatcctttctgctttatcacgtttggattcaggaactttaaggtagtttttgataaacctcaaatagttctagtttctatatacccacatttggatttcagatcattaaattaagtcctatattaaatatctcgtttattttctataatccaagaaacaaatcgtcaaattatcatttttcattatatttattaatactaatattatattaatattatatcaaatataataataaaattatttactactacttattattcactttaaagtaaataactagtatttgaagaaaaaaactgaacattcattgatcatcaatagtaatttttaaatcttcagttattatcttataaatttacattctttttgttgtttattttcaaattcacatcttgtattacaaaggaaaaatttcattaatttatattacacagagattgattttaaaactgaaaagtaagtatttattacatttttacttctctctttactttggaatatcatactaacatattactcactccctacatattatactatagatgtcttacgaagataattacgatcaacatagaaccaatcaaggttactatgaacaaaatgcttatgatcaacaaaatcaacaaaattatgatcaaaacgcgtatgatccaaatcaacaaaatcaaggctattatgatgattcatattatcaaaatcaacaatatgatccaaatcaacaatataatcaacaacaaggtcaacctggtgcaggttattatgatcaaccaaatcctaatgatcatgaaacttattcagattttagttatggtcctggtaatatccctggtaccccttatgataatggaggttataataatcctaattatactccttctcaagcaagttatggtgatccaagatcctctggtgcttcaactccttattatggtgcaggtaatggtatgaatggtatgtatgatcaaggtatgattgctttaccaactgatccttatcctgcttggactgctgataatcaatcaccaatttcaattgaacaaattgaagatgttttcattgatttatgtaataaatttggttttccaaagagattcaatgagaaatatgtttgattattttcatggttttattagattcaagatcttcaagaatgactcctgctcaagctttattatctttacatgctgattatattggtggtgattccgctaattataaaaaatggtattttgcttgtcaaatggatatcgatgatagagttggttttgcaaatgttgatttaggtaaaattaaaaaagcaaagaaaaaatcaaagaaaggtatctttaaaatgggtagaaaaaagaaaaatcaagatattgatatgagtgaagcaaatactgatcaagttttaaatgaaattgatgatgatgattctttagaagctgcagattttagatggaaatctgcaatgaatagattatctcctgttgaaagagttcaacaaattgctctttatcttttaatttggggtgaagcaaatcaagcaagatttactccagaatgtttatgttttatttataaatcagcttatgattatcttaaatctgatgcatgtcaaaatagattagatccaattcctgaaggtgattatcttaacagagttattacaccaatttatcgtttcttaagagatcaagtttatgaaatttcagatggaagatttattaaacgtgaaaaagatcatgataaaattgttggttatgatgatgttaatcaattattttggtatcctcaaggtttagctagaatgtttgttggtgaaacaagattaattgatttacctcaagaagaaagatactttacaattaggtgaaatcgattgggaaagtacttttattaaaacttataaagaagtcagatcatggttacatattattactaatttcaatagaatttgggttgttcatatttcagtttactggatgtattgtgcttataattctccaactttatatactcataattatattcaagttttaaataatcaaccattagcttcatcaagatgggcatctgctgctttaggtggtagtgtggctgcatttatcaatattttagcaacaatttttgaatggctctatgttccaagaacttttgctggtgctcaacatttaacaagaagatttattttcttatgtatcttattaggtgttaatatcggtcctgttatttttgtttttgcttatgctggtttaactttaaaatcaactgctgcattagctgtttcaattgtcatgttctttattggtgttgcaactatcgtttatttaactgtcatgccattaggtggtctgtttacttcatatgttaaaggtaattccagaagatatttacctcaacaaactttcactgcatcttatgctaaattagaaggtattgataaatatttatcatatcttgtttgggttgcagttttcggtgcaaaattctcagaatcttactatttccttgttttatcaattagagatcctatcagaaatttatcaacaatggatatgagatgtcatggtgaacaatggtttggtgataaattatgtaaacaacaagcaagaattactttaggtttaatgtatgcaactgatatgttacttttcttcttagatacttatatgtggtatattttaactaataccattttttcagttggtagatcattttatttaggtatttcaattttaacaccatggagaaatattttttcaagattaccaaagagaatttattctaaagttttagcaactgctgatatggaaattaaatataaaccaaaagttttaatttcacaagtttggaatgcaattgttatttcaatgtatagagaacatttattagcaattgatcatgttcaaaaattattatatcatcaagttccatcagatattgaaggtaaaagaactctaagagctccaacattctttgtctctcaagatgataataatttttcaactgaatttttcccaaaagattctgaagctgaaagaagaatttctttctttgcccaatctttagcaaccccaattcctgaaccattacctgttgataatatgccaacttttaccgttttcactcctcattattctgaaaagattttactttcattaaagaaattattagagaagatgatcaattttcaagagttaccttattagaatatttaaaacaattacatccaattgaatgggattgttttgttaaagatactaagattttagctgaagaaactgttgcatttgaagatgaaaaagaggatgatgtcaaacaagaaattgatgatttaccattttattgtattggtttcaaatctgctgcacctgaatatactttaagaacaagaatttgggcttcattaagatcacaaacgttatatagaactgtttcaggttttatgaattatgcaagagctattaagttattatatagagttgaaaatccagaaattgttcaaatgtttggtggtaatgcagaaggtttagaaagagaacttgaaagaatggctagaagaaaatttaaacttcttgtttcaatgcaaagactagcaaaatttaagaaagaagaattagaaaatgcagaatttttattaagagcttatccagatttacaaattgcttatttagatgaagaacctccattagaggaaggtggtgaaccaagaatttattccgcacttattgatggtcactgtgaaatcatgccaaatgaaagaagaagacctaaatttagggttcaaatatctggtaatccaattttaggtgatggtaaatctgataatcaaaatcatgcaattatttttactagaggtgaatatttacaattaattgatgcaaatcaagataattatctggaagaatgtttgaagattagatctgttttagctgaatttgaagaattaaatgttgaacatgttaatccttatgctacaagtttatcaaaagaaactgctaaagttactcatcctgttgcaattgttggtgctagagaatatattttctccgaaaatgcaggtgttttgggtgatattgctgcaggtaaagaacaaactttcggtacattgtttgcaagaactttagctcaaattggtggtaaattacattatggtcatccggatttcttaaattctgtttatatgttaactagaggtggtgtttcgaaggcacaaaaaggtttacatttaaatgaagatatttatggtggtatgactgcactttgtagaggtggtagaattaagcattgtgaatattatcaatgtggtaaaggtagagatttaggttttggttcaattttgaatttcacaactaaaattggtgccggtatgggtgaacaaatgttatcaagagaatattattatttaggtactcaattaccattagatagatttttatctttctattatgctcatttaggtttccatatcaataatttatttatttcaacttccttacaaatgttcatgttaactttagttaatattaattccttagctcatgaatcaattatttgtatttatgataagaataagccaattaccgatattctatatccattaggttgttacaatttgatgccagcaattgattggattagacgttatacattatctattttcattgttttctttatttcttttgttccattattagttcaagaattaattgaaagaggtatttggaagatggcagttagattttttaaacatatttcatcattatcaccattatttgaagttttcgttgcacaagtctattcaacatctttagttaatgatatttcaattggtggtgcaagatatattgcaactggtagaggttttgcaacttcaagaattccattttctgttttatattcaagatttgctgaaggtacaatttatgttggtgcaagatgtgttattatgttattatttggtacaattgcacattggcaacctgcattattatggttctggacaattattgttgcattaatgttttcaccatttgtttttaatccacatcaattttcttgggaagattactttattgattatagagattatattagatggctgtcaagaggtaatactaagtggcatagaaattcatggattggttatgttagattatcaagatcaagagttaccggtttcaaaagaaagactattggtgatgattcagaaaaaggtgcaggtgatgttccaagagctcatagaactacagttttaatttctgatacaattccatgtgcagtttattgtgcgggtttatttgttgcttatacttatattaatgctcaaactggtgttcgtgatgcaaaattagttaattctgttttaagattaattatttgtgcattagctccaattgttattaatattggtgttttatttggtactttaggtttctcatgttgttcaggtccactatttggtatgtgttgtaagaaaacaggtgcagttatggcaggtattgctcatggtattgcagttgttattcatattgcattctatgttgttatgtgggtacttgaaggtttccattttgctagaatgttaattggtttaattacaatgatttatattcaaagattaattttcaaattaattacattatttgctttaacaagagaatttaagaatgatcatgcgaatgttgcattctggacaggtaaatggtatggatcaggtttaggtattgcagcttggactcaaccatcaagagaattctgtgcaaagattgttgaattatcacattttgcaggtgattttgttttaggtcatgttttattatttcttcaattaccaattgtttgtattccagctgtcgatagatggcattcaatgatgttattctggttaaagccaaatagacaaattagaccaccaatttattcactgaaacaagcaagattaagaaagagaatgatcaagaaatattcaattttatattatacaatcttagttatttttgttgcattaattgcagctcctgcagctgttggttcaattaaatcagttgatattcatgcaactaaggaatttccatcgtttgcagatggtttattccaaccaagacatcaagataataatgatacaggttttggttctggttcatataaaccacattggactactaagactacacttgcaacattttcaactactaaataatcgatgtaagtttgaataactacattaactgcactgttattatattcatgtaatctacagattatcaattaatcattcatcaagattttgataatctacctatatactattattgattttattcattttttttcaatcaaacacatttttatccatttcaatttcaatttcaatttcagtttcatttacttttttcaataattttaattttgttaggattatttaacttaaatttacattatattataagaatcaaaccattttttttacacatttttttataatataaatttatatcttttgaattttatagtaacattttattttattaaaattacagtactagattactacgaaattattattatgtaaaatatgcacaatttaaattatattatgaaatttaatttgaatataaagtgtaactaagaatagaaaagtaaattaaagaagtgaagatgaaaaaaaatgatatcgaattatattttaaaaaactgataattaaaattaatgatggaataatctgattggattttcaacataaacgacatcatgagcatcagcggcatcaaagactgctctatccataactgaacctgaaggagcagcaatatatttaacaccagatctaacagctctataaacattatcagggaatgggaagaaagcatcagaagataaagcaacattatttaatttatctaaccattctcttctttcatctaaagttaaaggagttggaataatttcaaatttagattcaaattctgatttttcaggttcagaagttggaactttgatttgaaacgtaaagatcaattgcatttgatttttctggctttttaacaccttttgcccatttaaatcctaaaactcttggatgttgtcttaaccaccaattatctgctttatcacctgctaatcttgtacaatgaattcttgattgttgacctgcacctaaaccaataaccataccatttttagcataacaaactgaatttgattgagtatatttaagagcaattgttgcaactgttaaatcaattgctgcttgttcaggtaattctgtatttttagaattaaattctttaaaagttgaagaattgaaaattgcatcatttctcttttgttctaatgtaataccataaacagttctcttttcaattgaatttggattataatttggatcaatttgtaaaacacaatatttacctttcttttttgcctttaataattctaaagcttcaggttcataacctggtgcaataacaccatcagaaacttcttttgaaataatttgtgcagttggtaaatcaacaatattagataatgcaataaaatcaccaaatgatgacattctatcagcacctcttgctctagcataagcatttgctaatggtgataagttttcaatattatcaaccatataaattttcttttcaatatcagttaatggtaaaccaacagcagcacctgcaggtgagacatgtttaaaagaagcagcagctggtaaatttaatgaagctgataattctttaactaaaggccaagaatttaatgcatctaaaaggttaatataacctggagaacctgataaaactttaaatggtaattcaccttcagtaacaaaagcttgagcaggtttttgatgaggatttgcaccatatcttaaaggtaattgagctttaccttcactatatttctttctaaagaaatcagagatagcagtatcataatctgaagtatgttcaaatgcctttaatgcaagagtttgttttaaattatctgaaatatttgaatcttttgataattcttcaaggaagattggataatcttttggatctgataagattgtaactcttgaatgatttttagcagcagctcttaaaagtgtaacaccaccaatatcaatttcttcaacagcttcaggaattgtaacattaattttagcaacagtttccttaaatgggtaaagattacaaacgacaaaatcgactttttcaatattttgttcctttaaatctttttcatcagattcaatatttctagcaaggataccaccatgaactgcaggatgtaaagttttaactctaccacctaacatttcaggagcatgagtaattgattgaacatcttcaactgagaaaccagattcacgtaataatttagcggtaccacctgaagctaaaagtctaacatttgcagcaactaaaccttttgctaaatctaataaacctgttttatcataaactgataaaattgcagttttagtataagtatcttgagacattattaattgattgattaaataagagaattaaaattaaaattaatataagaaatcaattgatgttgaaacaaatggaagaatgcaagagttttaaaagaaaaatttgaaagtatttaatggaaagtaagattaatataacatgtaaattgaaatgaattaaatttattaagggaaggttccaagtcaatttattatagtgagtgattatgagtatgagactctgactttttattattattatattgtctgaaaatttttatattattattatagggtcacgtgatgatattatgtcgacaacatagtattataggtacagcaagtatttggaatatatagatagacttttatacagaactatacaataaaaaatggtttggtaatagagagaaataagtttttaataatattactattattatcacacttattttctgtatctccataaggaaagagtattgtgcttcttccaggtgtgtcttctacccttttgagttttagtgtataagtgacccttgttaatacctcttgattgtttaccagcagcagtaagacctctgttttctctgtgcttgtgaactgggttacagatccagttgtaagcagcattatttctaataccattatgatttggatcaactaagataacttcataatatttataagttgaatcttcattaatccagtaagagttaagaactcttaagttagaagctcttctaccaactctttcttcagcggtaactcttaaagatttttgatatttaagatggttaacaccttggttagttggtttaccgtaagtagcaccctttggaacaggtctctttctgttacctcttctaactctaactctgtagatgacaaaaccttgtttagccttgtaacctaatcttctagccttatctggtctagatggttgagcagctctgtgaataaccttcttttgtctgtattcccaacatctgactcttaataagaatctcatgacatcagattgcttctttctttgaagctcttccatatacttgtaagcacccatttttgtttagtagtggtagttagtttgataacctgttagtaaatgaaaggaagaattaaaatagtataagatataagataaagtaataatactaatatagcaataacactatagtaaataatacctataagacgttgaaaaaaaaatgaaaaatgaaaaaaaaaaaattttgcgtttttcagtcgctgaaaaatttaagtaagggaaaaagagggttgttcccaatgcggtaattagggttaggtgagggtgttgggtcacgtgttgtcttttcattaatttttgttaatgatatgtttattattattattacttattaagtttcgaatattatattcttaacagtttctttcaaagtttattcactgatttacattattgttctagtatttactttcttatcgtgtaatcaactactaacaatgactctgatgtatgtattactataataaataatataactatttattactttgaattctcaataataaagaaataatagcacttaataatactccgaattcattccgaatattaagcaatattacacatattttccacttcttacggattccttgtactaacataaacctcttatgtccttctactaatactaatactcaatatatcaattgaagttgttaataaagagtgcaataatgaatactaataagtataataatcaataggcggctcagctaatatttcaatcacaccataataaaaatgatgccattttacttgagaaaacattgtttacgtaatcattttctattacctaataataaattaaatttactgataaagaaagatgtcaccaactgataagaaaaattattttattttattttgttttactatatcatcttagacactggaccattccctgattttaattaatatattacaatttcccccctttcatttatgctattacttgcttctctattattctattacttattatatgatactctctttaattaacaactcaattgtatctgatattattattatagttgattaatacatatccccctcatatcctatactcatctatttcttttatacagttctaatttaagagaaaagactagaaaattaactaaatctgataaacataaaactaaatcaaaaagttcactcaatttaaattcaaattcaaattcaaattcaagttctttttcattaacttcaagtaaaagatcattttcatctagtagtgtcaatagttcaagatctaattcaaattcaaattcaaattcaatacatagcagtaataatagtatacattctacaactgctataaatacaccaactattaataatacatctgtaattgataataaagaaaatataccaattgattcaccaatcaatacatcaataccaagttctaaggatacttttgatacagaaatttcatctgttcctttaacaactaacgaaacaactaaaacaattttaagtactttaacaacagcgacacttgtttcacttaaagaatattcaccaataactaacaatcaatcatctgatattaatagtgataatatagctaaaactccagttattttagatataccaaatttccattcaaaagatttcattataaacgatatgacaaattctaaatcaaaggcaaagaaaataatttccaacgaaaaggaatcaattaatgaaacagctgataaaatagctgataaaattaatgataaaattaatgaaacaattaatgatgattcttcaaaggaagaaaaaattgatgatattaaatcaattattactaattatcttgcatctattaaatcaaatacttattcaataattaataattcaattttattaataaaatcaaatattgcaaaatcaattgattttacaaattattatctaaattctttcataactaaatcaaaagaaaatcctttaattacttataattcaatttatcttattactttaagtactttaagtggttttgcattttattatcataaatattaccttgcaacacaaaattgtactaattgtcatgataatattaaaccaattcatatacttgcttcaattggtttaggtgcttcagttatgagtattggtaattatctttacattaaaaagaaagatgaaaaataataataattatcattcaactttttacaatacaatttttaacattatttttttctgctatttacatcatattattatcttctctataactaaattcccttatatcattaacccaaatttataaaaattttatttaatctaatttattttatttcactcttaaattcaaatactaagtacagttaactaactgtaaacataatatttttttaaagagaaaaaacgaaaaacaaaaaacgtttaaaaaactcttaaactcataaaagaaaactacccaaaaaacaccggaaacatcaatccaaaaacccaggtgtaaattgtaagttgataataagtaaattgtaagtaaattgtttgttaaaaaatgttttattaaaaaaatattttgttaattaattgttattttatgttgtaaataggtgcgtcgattattctgttgatatttttgtatcttgtatttgtaagttgtgtaatgtaaattgttatcttagctgctttattttgattgtaaaaatgattgattaattaataaatttaatttgaatagaaaaatttttagttaaaaaaatttaatttgaatttaaaattataactttgaaaaattgttgtgatatcgtattaggatatcgatttgtaaattgcctttcggaaaaaaggacttttttgaaaatttgtgatactgataatgtatcatttgtaatggtgccccctgttaagaggcttgaaaattgttgtgatatcaattaagatatcgatttgtaaaatttgccttatggtatttaaggacttttttgaaaatatgccttatgtataaaggactttttgcccctgctttggaggcttgaaaaattggtggccacgtctgacaccgaaagaagaaaaatcaaaagagaaaatcccaaattgaagaaaaagtgggaaatgcgaagtttttatacttgaaaatcaaaatatttatcttatcactactaagtcagggtttctcttttataaacaataatcaaataatcaatacaatcaactgattgttactggttatttttttaaagagaaaaatgaattgtatcattttaaaaaactctggtttgtttattggtggtattatacaccattgtctgtaatacatacgtaaatgctgttacacataaatcgagtgcattatcatcgatcctgtgaaatctttattcacacggatttaagacccatataaatcctctcagagggtattatttaaggtttatacccaatgttttagtggactaagttgaaattaatccactaaaattttgggctctgcctatgcaattgctccctttgggagcaagacacaggatatataggttgttatagcttttgcctggcagcctttctgcagggaaagaagaaagtgaataagtaaaattcttaaaaaaaatgggggattgtagtgttatttatacaaaaaaatgggactgtaagaagcagaaacagaaaatctaatttatactgtatcatccaaaaggctagaacacaaatatgttgtaactgctatatctactcagtcaatacaatcatgtagatcaactccatcctttaaaccatcataaatattcagtacttctagccatgtaaaaggtaaatttgtactataaatgaaatatgtatcataagaagtttcattcaaatttacaacccctgttgtatgcattaactagattaaaaaaaaattattgtataaaaaatctgttaagttaaactgtatactacaaccataacatattgtataatataagtcataagcaatatattacaatttgaatcaacaatcaatacaaataatcaatacaatcaactgattgtaactggttatttttttgaaagagaaaaatgaattatatcattgtaaaaaactctggttaactatactattgtaatatcaaattacataactgcaatcattatcagtcccgataataggtgccttgcagctgttcgtatatgcaaaaatcatatagccttgcatataggaacctccatattgttctaatatagagttattcccaacctttgcatgggaatcatcatcccctacgtctccacgcatactcaatctacgcttcttcgcagagggttatacgcacgtgatatatcctaactaatatacctacgttgcacctgaattatatgcaaactcatccgttttgcatttaatggccctataattcaatatagggttgattccaatcaacacttggaatataattggttgtttcggctaatatgtatatcaacttatctccagtcattttgattcgtaacgtcttatatccactttcaattctgaagctttacctgttcaacggatccttatctcagggatgtatattaatgcataatttctaggaattaattcaattttctggtatcgttatattactgattataactaatgcgtcttatatccacttcctgaacattataatatgaagctttacctattttagtttccaatgataatcctaatctgacatgtacatgattttaatttatcgatacctatttatattttctttcaaataaaattctgttttaaaacgtctcatattaactcaaactcaacaaacgtttggtgttcctattttaatccttttgtaataatttctgagatgctactatagatgattcattccataaatgctggtattctgtaagctatataacactactgccccggcagccaatctgcaagaaaagaagagagtaaaaaaaataaaatttttaatttctaaaaaaaagcgtactacacactgctatttatacaaaattttttgtttctcagttcttagtactcatcaccaagagtctgttgtctattacgtaaaatttcatcaatgttcaatgagtttaactcttcattctcttcatggtagaactcttcctccccatcctcttcttcatcatgtttcttacctattaaattaaatttattacggtatgttctgttggataacccgatagtattactatcttcaaattttggaattttaacaattttaccacttggtaacatctgttctgtgtatgcatcattagatgaaactgtaactaaacttggagaatctggtggtaattcagttggattaaccattgtacctttccttttacgattttcagtcttttcacttggatgaattgaacctttcttcataaatgatctaaaattatgaatattattctttaatttatcattttcaccttcattatcacctctattttcaatatcaattccaatacttaaatctccattctttttagcttcataaatttgtgattcatgtaaccatgtccaaccttgctttaattcattatatgattcaagttctaattgtttctctaatcttggatctttctctaaaatttggaatttttctgtatcagttattttaaataaatgtgaaataaaataaaatagaaaatcaatccaaatacctaaaactgttaagattaaaattgatgcccaaaatgttgaatctctaccaaattcttcaaataatccatgctgaacataaaaaattgtattaattttagatctatataatccaactaataacatggtccaaacaatccatccaacaactgatattacccatgcaataattgatagttttgtaattgtatgcatttcaaatatattcaacttggtattaataattataatgaaaactgtaaacaaaataacacctaatggatatgttgtattatccactaatgcagggaatccataaatattccataatataaaacataatgtaactgattgtgttgttgcaagtataacccattgaatgaatacgaataaattgaatgtttcattattaacacctttactatacaattcgggtattgcaattaatgttgatggttttaaatctttatcaaacataccaatacataaaactggcaatgatgtaaacaatgtattaaacattgataatgaccatgattcatataatgaagatcctgtaaataacgtgtatctttgataaagtaattgtgataagtaaaataataattctttgtaaaaggtacaaataacaaacttcgatgttctaatataattatatctaccatgaaccaataaaagttttagtaaatatctaaattgtgcaatcgaataatcacttgttctagctgcctgtaaaccttctttacctgtaataccaacaccaacatctgcactttgaatcattgcaatatcatttgcaccatcaccaatagctaatgtaactttactcttatcaagttcacgaactttagtaaccattgttgccttttgtgaaggtgatgcacgacaaacaataacagaattagccttaacacctaatgaaataaatgatgataatacacttgcatttttttcaatttcagttaatgtagaaccatcaataacaacaacacaatgtgctaaactatcttcattgattaatctctcagtgtcagttataactgataataatctttcaattggatccatacttgatattgtatcatccttgtcagaatttgattcatcatttttatcaattgataaaataacaactttcgaataatctttattaatttacatgagtatccaatattaattgcagtttctcttttatcacctgtcaacatccacattctaatacctgctcttcttaatttttcaattgcttcagggacaccgtcttgtaatttatcctcgattgcagtacaaccaagtaatttcaaactattttcaaattctttaccaatttcagaaattttctcagatctattaactaatgatgttttagcttctgcatatcttttactccaatcttcatacttagttgagtctaattctctatatgaatataataatgttcttaatccatctgatgaaaattcttccatatgttgtaaagtacgttcaataaggaatttatcatcattaatcaaatggctaggtggaatgtattgttgttgtgttaaattgtattttttcctgttttcaatatcaactgattttctggaatccaaaataatctgatcagtttcacttcttgtatcattatccaatatagaattaatattatcgtaatggactgaactttttctacctagggtaaaactcagtttacttaatgatgttctcggtgaatttggaggactaagattgtcaattgatctcttttgaaggataaactccgcctctgctttctttctattatttactgtctttgataattcttgttgcttattcttaacaatataagcttcttctaatctttccataataatattatctgcccctttacacaataaaataagtttaccatctggaaatttaacaacaacagacattctctttcttgatgaagtaaattctataacatctaatatttcatattcagtaaattttggttgattgtcaaatccatttggatatgttttcaatgtaactactttctgtttcttatcacataaaataaaacccatatcgcacgctgcttgaactaatgctaattcatcaggtgatgatgcttgatattcaatatctgtttcttctgtgtacttggttgattcatcaaatggatttaaactaacatctgccacttcattctcctcttctgtaatagtatcatttttattcatgtttgtagctggttcaagagaatcaacagaatctctaatttcttcgttcttttcaatttttcttggtaaacaagtatgacatagtgcaatggataataagaaaaacgttgatttcttagcaaatgatgtattaggattagattgaatataattaataaattccaatgatgatttgatttccagtggattagatggtgatgttactgaatttggtgatccaaaagttcttttaggatcagattttaatgatgccatacttggtctacctggagcaattattgcacctggtttttcttcattatttgaaaatatatcagaaaaatcatacttctgaggatcttcttctttcttcattaataaatcaatatcatgtatccatggaacaccacaaactgaaaatttcctaaaaagcataacattatcagtcaatgtacctgttttatctgagaaaacgtaactaacctgacctaattcttctaaaatagttgcagttcttgcttcagcgggtgtatctgttggtaaatgatacatatcaatatcccattgtagcaataccatttgaacagctttgataatttccatagtaacatatagtgaaagaggaatcattgtattaaacataatgataaaacccattattgtaggtgcagttccggcatttacacgatttatgtaccaattaagtgtggcatatttattgtaaaagattctttctgccataaaactgaataaagataatgatataacaaggaaaaccataaatgcaacaattatattaatttttctctgtaattttggggctttaactcttggatttttgatagcattcattctgattttcgtttcttcaccagtaaatataacgacacctaaacagcattctgtatttctgataatggaacctctataaataatattatcaggacctaatggataagtcttcatttcttgtgttttaaaatcaggaaattgtaaggaaccttcaaaattgtataaatcttgattaggatcttcagatgtgatagttccggaaatattgaaaagatttttggccttatttgcatagttgtttaattcaacgtttggaattcttgatttcaagttagtctcaccatctaatgccatggtttctataaatgcttcacccatttcattagtagcttgtaagaattgcaatatctgctggtacccaatcatcagaattcaatttaactatatcaccaactttaagatctttccatcttgttttaacagcagagatacccaaaccactcagtatacgttcatcttggaaagagtttggtttgattgcttcattttctagttcttgatccaatgcatcattctctaattgaaagttataatcaaatgattgtccacttggtcttaatcttgaaattgaggtcgtacttttactaaatctcatatctgattcaaacatactgtttggtgccgtaaattcctttaaaactttaacttttttattattttcttgtttatccaatttatgtcttctaatatcatcataaccttcacgcaacatagaaattgaaataaaaattgataagggtataattgtggtacttgtaccagttgttgaccatgaagggattagttgtaagatagcaacaagcataaaataacaattggctaatttggaaaattgtgcaataagctgtcttggtaagaaacttacaagtgtgtatcttgatgatgtaattaaattattgacatatggctgattgttacgttcatctataagtaatgtttgattctttttatttttggtaactgggaaatcagtatttgatatgttaattgtaatcggaatgtctctaccaccaacagatggtaattctggtctaccaccagataaaagtaggaatgcacgtttgaaaaatcctggtgaaattttctttgtaaactggtttttcttttgtattttactaaatatgcttctctttggttgtgtttcatcacttaatcttattctattttttctatttttggaatcgaaattatcgtgtgtgtactcatcagttagatccattatagattcattagttaataaagtatcaaatctcaagtttttatcatttcgttcgtattcctcatcattatgaatgaaatcaggattgtatgagttttcaactgatgttagttcgatatcgttatttgcgttatcggagctcgtcgtattattgatcttactaacattgttgagatattgaattgactgattatgcatactagtattaagtaattgagttcttaaactgtatcctctagcacgtgtcttcacagttttagatggacgataatcttggttgtttatattcacaggaattggaaattctttagctaagccttcgtcttctgaatcattaaaatcatcatctaatagaccagatacagaatttctaggtttctcaggttcaatatagaaaggattgtagttcttagtctcttgacctttgtttggagactttggaggcatcttgtttgctagaagaagaatacttggcaaccagtagcaatctaaagcaacagtatcaaaatctgtttcaacatcgattggaaaaactggagaaagttaaaaaattaatccacaacgtgactccattttccgagattgaaatttttctctaattttccgagacaaatgtgaaaaagtgaaatttcttagccaactatagtggtcagatacttcattactaagtgacatttgggatgctgtaatctctgacttgctgatactgcttttctttagccaaaacaatgtttttttttcgtaataaggcactgctaatggcaggagtacgttcggtacagactgccgctggtatctctgcttcacgtgcagcaatcaaccattctgtttcaaaatctatatggaaaaagacttcaaatccaatgtttaaaacaattccttcaagatttttctctgcggctgttagaacttccaatgcagctgcaaaatcagctactgaagctactataaatgcagctaaggtagcaccaaagagtaattggcctgctaattcaaataaagctgttggatacttatgtattggatcatcaattcttgtctttgctattgtcgttctaggtggtttaactagacttaccgaatcaggtctttcaatcactgaatggaaaccagtcactggttctattcctccattaactgaagaagattggcttgaagaatttgaaaaatataaagaatcaccagaatttaaacaacttaactcacatatggatgttgaagattttaagtttatttattcaatggaatggtcacatagattattaggtcgtattattggtacagtttttgttttaccaacactttatttcattgcacgtaaacaagtttcattgaaaactgctggtaaattattaggtatttgtggtttaattggtgttcaaggtgcaattggttggtggatggtttattctggtattgatactgaactgcttgaagagagacgttctaaaccaactgtttctcaatatagattagcaactcatttaggtgcagcatttattgtttattgtgcaatgatttcaacaggttttagtgttttaagaaatcaatggatcatgaagaatcctcaagaatatgcaaaatatttccaacaaattcaatcaaaatcattatctaaatttaaattcttatcaaagggtttattaggtttgattttcgttactgctatgtcaggtgcatttgttgcaggtttagatgcaggtttaatttataatactttcccacatatgggtgatgattgggttccttcagcaaatgaactttttgatcctgtttattcaagagttaaagatcaatctgatctttggtggagaaatatgcttgaaaatcaagcaactgttcaacttcaacatagaattttagcaacaacatctgcattatctgtttttgcaattcacatgtactctcataaaatcaagactataattccaagacatgcatataaatggttgaatattagtatgggtattgtttcattacaatacgcattaggtatttgtacattaatttatcttgttccaactgatcttgcagcagctcatcaagctggtgctcttacattacttacatgtgttttacttcttgttaacaatctcaagaaaccaagtagagccaatctcatgattttgcaaaaagcatctccaacaagctgctactaaaaaataaatttgcaattaataataatacttaagttattcctgtacatactactctataacataattgtatagataattaacatactagatgccttgtaaaagatgcatgaatacagcagagcctcctcacattgagcaagtcctggtcccctcgctaactgctgccagtgaattttttcatgattttgttgagtgtgatgataatgttcaaagacagtctttactacattatactgtttcttttaaggtatatacacaacacaatatgctttttttctccttcttcaagacccttgtggatcaagaggtacgtatatgtgacaactattaacttgaaacgattagataaaaacaaatactaacatttttccttaatttttttaaactttatccagataactgtggagttaaaaaatgacatccaaatagttggtactctattgtcagttgaccaatatctcaacttaaaacttgataacatacaggtagacactgaaaagtatccacaatttctagctttaaagtctattttccttagaggtacaaatataagatacattcatttaaatccttcgactgttgatactaatcttcttcaagatgcaagtagaagagaagctatggcaagtgctggtgaaaaaattgctggtagataataaatataatatgtttcattattattttatgctatacacgttgtatattaattatatagttaaagatttttaaacttcttcaaagtgatggatacaatattttcggacattgtgaacgtttgtgtcccttttcattacaatatgaacatgacattttcttttttcgactactagtattgactagtttagtctctggcacttttggtattgtaggtaattatctttgatggtgtttcttcaattatttccttgcatggtattaaaaggtaatcaccatcttctgtatgatacttcttgatcttctctataagatccgtatcattaattgtatttgttgctctgtcaatgttcagcttttcctgtatttggcgtatataactattcaaaacttccaatctttcattatatttcttttcaatgctatccatttctttggtttttacagaaaccatgatggcaagttctgatattcggttgttcaagtcttttatttgatcttctctgttcattatctaattcttgtttgtcagatgttaaataaatacaatttgtatatagtaaaatctgaaacgatgaacaagcttgtaaaatattgaattgaatgaaatattttttttaaatctttaattgtgatttttccttactcctttctgaatctttatttttggcatcttttttttggccagggaactatatacatgatatgacagaaccagtggaacataacttgaaaagagggcgaaataatgatgaatttaatgaagaaagaaatgtgaaaagagtaaatacaattaaatatgaacctgatgttggtgctgatgctgattccatttcagaatctttgcaggacgaaatgaccgatcgacaactcacacaagagtacgatggtgaatctgattctgattattattccgaatccagtgatgatgaggaggaagctaatgtagatggaactggtcctacatcaaagaaagacattgatgtgacattaaaagacgagtcaaatagtaccagctcgatccacgtaacaaagactaataatggacataagttgaatgttttaccattaaacttgaagcgtattgctagagaaaaaccaagtgtttatgaggcatctaatcttgaagttatttcatatgcaacactaaaattcaaaaaaccaagaaccttgaatgcagattatgtacgaattgataattcacgggtacccaaattaaagaaggaatttttagaaagtggattgtttaaaaaaccaacgggaataaaggatgttcattataaatcaccagatgaagttttaagtgaaaactacggttttgcaccacatgaattagtgtacttaacaagagatgagatcaaggttttgaatggtgtagatttgcctggtgaagaaattttaaattcaatacattattatattgctgatcgtatacgtaagaaactcaatatttcagaggaagaatataatgaaaaatatgcaaaatgtatggatggctctgcattattagccttaggtgccttagtaacaaaatgggtggatgatttatgtggtgattctactttcaaatcccatatggaaagagtaagggatgatacgaaggttaaagttggaagtattgatgagtttttaagagtttacgatgaagaagatttaaataagtctgaaaatgactctgacgacgatgatgctagggatgaagataacgatgataatactggaaatgtcgagaatagtgatgataatcaacattcaagttcagaatcaagctcagaatctgatacagaaagtatcgaaccagtgctgttacaagtttaagccaattatagaaatcatttttttatagactgataataaaagattttgttctttaaataaacctttttatagatattaaaactttactatgtaaaatattcagttaacgatgttctttaaaatgtagtgtattaattgatcgtatgaaagtaaaagtaaagatacatgggggaaacagctatatttaaagatcgaacacgaaccttcaaattttgctgatttgaaaaacttattgataaaaatttttttcatgcaacttgaaatttcttcatgtttctgattaaaagttaagttaatggaaaagaaactctgtaatatttctatacgacatatatcaaagatggctaaaaagggtagaagaggaagaaataacaataaacttggaaatagagatgatagacaaccatggagtcaagttaagcaagagaatgaagcatgggaaaaattctatactgaacaaaatttaattccagatggtaattttgaacttttcaaaaagacctgtcaagaaactttaccacttacatttagagttacaggttcaagaaagcatgcaaaaattatttcaagtttgtttcaaaataaaatcatgccgttattagataatattgaaaatgttgaaagtattgatagttcaaaaccatataagaaaccattttcattaccatggtatccagataatttagcataccaaattgatttaccaaagcaagttattaaaaaagttccagaatataagcaagtccaaaaatatttgcttgttgaaaatgaagttggtaatatttcaagacaagaagcagtttcaatgattccaccattagttttagatgttgaaccacatcatcatgttttagatatgtgtgcagcaccaggttctaaaactgcccaattaattgaagcattacatacatttaaagattctaatgatgaaactttacaaccaacaggttttgttatggcaaatgattctgattataagagagcttatatgttagttcatcaaattaagagattaaattctgctaatgttgttgttgttaatcatgatgcgcaaatgttcccaaaaatgagattagaagaaaatggaccattccttaaatttgatagaatcttatgtgatgttccatgttccggtgatgcaactatgagaaaaaatatcatggtctggaaagaatggagatttggtaatgcaattggtttacacccattacaattaaacatcttaaagagaggtttacagttgttaaaaccaggaggaagattagtttattccacatgttcactaaatccaattgaaaatgaagcggttgttgcagcagccttaaaattatgggatggtaaggttaaattagttgattcctctgacagattaccaggtttaattagacataaaggtgttgaaacttggaaagtttatgataaagcaggggaattaaaggaaacatataatgaagaagataaattaccaaagactattttcccaccaactccagaagaatgtaaagatttacatttagaacattgtatgagagtttatcctcaagatcaaaatactggtggtttctttattacagtttttgaaaaagaaggtgaaccagaacaagaagttgttactaaagatgttgaatcaaaggaagacgttaatattcttaagagagaatcaactgaaactgcagattctgaatctgatgcaaagaaacaaaaaactgaagaaacaaccaatgtcaatgctattgttaaacaaagaaaggaaaaattaccaattgatgcaaatgaagaaccatttattttcattaataaggataacgaagttttacaaaaatgttgggatttctatcaagtcactgaagattttccaaaagattgtgcacttgtcagaaatgcaactggtgaaccattacgttcaatttattatgttgcaccaatcatcaaacaaattcttcaaaataatgacgttaagttaagattcatttatacaggtattaaattatttgttacacaaaagagtgaagtttgcccatggagaatccaaagtgaatgtttacatgttataagaaaatatttaccaagtatcagacaaattgaaattaatcttgaattacttaaattattattacttgagccatcacctagtgttgcagaaatcagaaaaagtaatgcagatcctaaattctttgaacaaattgataatgtcggtgaaggatcattgcttcgttagaatcaagacaggttatgaagatgaagaattattcttcccattatggaaaggtaaacatagtttcaacttaatggttaacaaacatgaaactgctgaattattatacagattatatggtatcgataaggctgctattgataaggagaaggctgaaaaggaaaaggctgaaaaagatgcagctgaaaagccacaaccagaaaccagtacttctgaaaacgttgttgaagaagctactacagaagccgaaactacaaaaaattagattttatcccgtacgttaaatacttgtaaatccctttaaggcattgtataaaagagaacattattaaccatcaaataaacttgaatgtaacaaagtcctaaaacgatataatatatatcaaattccgtaacaatagtatagagcaaattccttatcatcaaatgataagaagacggatataataccttttaggaagtttgatgcgctgaattgaaaaattgggattttaattacgatccagtaaaataacatatatatataagatccaatgagtcagcatgtttatattatggtgggtttcaaatttattaaatgggtgaattgatacttgctttactcatttaacacgtactatgtatattcctgataagtaccttgaagagaactgggaaaaccaggctgaacttatcaaagcttatccattagcaactgttgtaactttcagctcagatggtttaattgcaaaccattttccattttatttaaaagtggataaggaaactggtaagaaatatttacatgcacatattgctaaagtcaatcatcaaattccatctttcaaaactggtgatgaactgatagttatcttcaaatcggcagactcatacattacaccatcatattatccaacaaagcaagatactcataaagttgttccaacttgggattttgcagctgttcattgttatggtactgctaaaatctatgatgaaactgaatgggttagagctcagctcgataatttaactgctcaagaggaaaaaaatagagaaactgaatggacagttgatgaagcacctgaaagttatgttaaacttttacagaaggctatttgtggattagaaattgaaattacaagaactgaatgtaagtataagtttgaacaaaagatgaaaccttgtgatattgctggtgtcgctgaaggtttggcaaaggatgacaagcatgaagttgccaaaattagttagaaaatgtaatcatatttaaattttattgcttctatcttcttaattacatttataacgcctagataactaaaatttattattctctatcaattagaacccttaaagtccatgtaagtattgatatttaaaaataatttacgatgtctacaatttttgattttattatcaatttttgttaagttgttttttggtttaaaaacaatatttaagttgagaatgggttgcttcaagctatttaattgtgtttcacacagaatgaagcttttatttgcaaaaataaaagatattatggcctaaatataaaaagtcacgtgatataagatttgggctatagaaattttcttccaaaataaagtatatgaaagtgaacggtcgtggttcgtcgttggatctttaatttataattggaatgtaatagttaacaacgaccgatcctttcttaaacttgaataaagtattaattaagttatagtctagttcttattaaaataaatataaataaatataaataaatgtaatctaattaaatgtaactctctacttttctatgtaatataaataaggattctctatgtcactgactatgtatcgactagatgatcttctagatgttttaaggaagtatctctaaatgatattattaaatgttgatgttgggaaagtattccaatatttatatttctcataaccttctctctcgcggatgatagaagtttctcgaatctattccgaaactattataatctttctaacatgatttctatatttaatattagttattcgagtattccaaataatcttatttcctaaataagtaattcataatcattcataatcattaataacaattcacaaatgtgtaataattaaaatataagaattaacaagcatccgttcatttacattacctcgcttctcgggaaacttcgtcctcgaagttcaaataaaaataacttctacatatcttgaatgaaaattataggacaatttaagttgatagttgatcttgattcataactttaatattcaatatgtgagacaatatggaaatagaaagtaaattaaccaaaaataatgatgagcgaaataatgataaaactgaagataattgtaataataattgtagatgaaataagatatcagacttctttgataattaatgacaacaatgacaatagttaaataaataatagttctaataatgatcatctgaaatataatataataattttcttaaaagttgataatgataaagacactatttgcaataatttctctaagataaaaatgaaaatatcttgataagtaaaataataatatcttgacaaaatgattaaattggaaataataatggttaaatataatataattgtaatgactgtaatatagtttgatcaacaacaaataaataagttcatcaatgcttaataataaataatgaaatgacaataatgtgattaatgctttgttgtaattatgttaggtaataatcatgagatgataataatataatacttgtaaatataattgaaatacgtttaaaataatgataatattgaaacgataatcacaatgtagtataataaacataaacttgtattatatgtatgatgtaataaactaatgataattattgatctaacattaatattaataagaataagtaatcctaaaataatatgaaatgagcataatgtataataggtgataaagcataatgatttaatagtaacattgatataaattgatcataataacatgttcagatagtaatcataatataattgttaaatggaataaatatatggattaatgaaatgatggaatgatctaaattgcaattgtctaagaattaattgataatatattaaattgataatatctaatgataaaacgatgataaaatgaggataattgcttgaatataaataatttcctaatgatgataaaataaatgaaatgatgttgaaatgatgttgaaatgatgttgcaatgataatatattaataataataaattaattaattaatggacataataatatcaataattcatggacataatttaaagtaatctttaattgtgttttagtaataggatttaagaacaatatagatctgatggtgatgtaataatgaaaccttgatggcatagtataattcaaataatattatgatgataaataaagtaacaatcaggtaacaatatgttaattgtaaaaatctaagtattcatataataataatatcagaataatgtaatggtaatcgtcggcgaaatcagttgataaatatggaattattcaatgttaaataggataataattttataatgctatgatgataatgtgataataatatgattataatatgatgataatatgatgataatatgatgataatatgatgataatatgatgataatatgatgataataaagataaaaatataacttagcaacgatattaattatgatgtgttaatgatgtgataataatgtaattataatgtgacgatggtgtaataacagggcaaacatattaataagttgatgaaataaatgtagtaaaatgattgctaaataaaataattcttttagtgacataataaattttaattgttctaattgttaaataatgggacaattgataattcatataaatattgacttgagagtaaagataattttcatagatggttaatataataataatttgataaataatgattgataaaatgataagtaacaaataaaataataattgagtaaaataaaataataattggataaaataaaataataaatttcaattgaaaataatgttatgactagactcttcattcgtgaaatcagaatggcaaaattttaatataataaatataatgaaaaataatagattgtaataaaaataatatttcttaatgttttgatagttaggtaaaagaacaaattgtgtattttcactaataggttaatatctaaatttgtaacaatgtaaaacaataaattgcaataatatatgattaataataaatttgaaatgttaatcttgagatcttattaagttgagattaaatacttaaatttgacaaatgataaataatataatatttgaaaattcgaaatttataatcttaataataggatggaaataatgcatgataaaagtattattaataattgtgcaaaaatagatattgtaaaaatattgagttgaaaattcacatgaagtatagttttttataatattgtaattaaattaatgttgatttaaataaattgtagtttgtaaattctaataagcaatgatattttttctttcttttataacgataatcaattaagtaaggtgaaaccactaatggattataggtaaattgtgagataaagctttgacatactggcaggaatataggttcaattaattggtctggaattaacttaataaaatgattaatataattttctttactttcactgagcttcaataaattaggacttgttggagtatttatagacaaaactgtatttgttaaatcagaaatttctttttcatcttcttcaaattcatctgcagtaaaatattcagattcagattcatcagcagtaaaatggtcagattcatcagtcggatgatcattataattaagttctttcatataagtattttcaaatttgaaggcaaaattgtttggagattcataagctatagtatttgtgtcttcatagacgtttttaatattcatatgttcatgggcaataatatttgtggattcattaatgtttttatatattgatttcttattgtgattggacttttctttagtttcaattgtattaatttctaggtttttattcttttctaaattttgtacttctaagttttcattaataatagtaggcaatttcactatggtattttcatttgtttctttattattagtatttatagtagcctttgttttattctttcttttagatgttttatttctattaatatctttatgatgcattggtaaatctgtcttttgaataaatgtttcattgtgtgcatatgatttattataattgtatgattcttcgtaattgtatgcatgtaaactattgtaattatattctttatatttgtatgcatgcgatttgttataattgtattgattcttgtaatggtactcgtgacggcctctttgctttacgtcacggtctctgttatttaaaaattctttaatgcatctcatagtataattatcttgattatttgccttgttgtttgtaatacgttcttctttataaaaataattttcaaattctttaatgaaataatcccatgttaatgtagtaatatcaaaattcttgttgagaaaccaacgtaatgatttgccttctaaatgattataagtgtagtatatcttgtatgcatcaggaagttttccttcttttaattctttatctgaaaaatgtttattgactctgttaataaaatttattgcaccttgacccgtgatgtcgttttcacctgaataaaagtatgatctataagtaattgtatcttctaaattagcaaacatgatgagctcttaaatgtataaaaataaaatatgtgaatgtaatatgccttaaaaataatatgttaaaaatatagtgtgccttaaatgtaataataaattaatgtaataattgatttgcttaactaatatgtagaatcagcgtgttcctgctaaaatgattctaatgtaaataatatgtgatatttgtaaattctagtaataatgattaataaataggcaacaatggaaataataaatttaggtggcaaaattaaaaaataaaaataatttgttttgagtctttaatgttgctggatagtaaatattaattaatgataaataaattgatttttaattttgtattttgaataacttgaacttaaatgtaaactaactttgaaataataaatttggataacttgaacacttgatttaaattctaattctttctcttgattttaaaaacggtagtttaaacaacactaccggtgctaccaattgaaagtgaacggtcgtggttcgtcgttggatctttaatttataattggaatgtaatagttaacaacgaccgatcctttcttaaacttgaataaagtattaattaagttatagtctagttcttattaaaataaatataaataaatataaataaatgtaatctaattaaatgtaactctctacttttctatgtaatataaataaggattctctatgtcactgactatgtatcgactagatgatcttctagatgttttaaggaagtatctctaaatgatattattaaatgttgatgttgggaaagtattccaatatttatatttctcataaccttctctctcgcggatgatagaagtttctcgaatctattccgaaactattataatctttctaacatgatttctatatttaatattagttattcgagtattccaaataatcttatttcctaaataagtaattcataatcattcataatcattaataacaattcacaaatgtgtaataattaaaatataagaattaacaagcatccgttcatttacagtatatgtaagggaataaatacaagttgttcaataatatccacgtgaagattaggtaagctgattacgtaaagatgataagatggaaataggaattccgagatacggaggttcggagatgtcggagtaagaaaggaatgacttagattgaaattgaattaattatgataaggagtggtatgattgataaggaatagtttaattaactatattaaggaatggttaatattgtaatataaataagtatgatatcctgtataactttgtataactctcttctgagaggggacattaatcagagtattagttagagaacaatctactaattaataccaaccgtctcattgctactcgctgtctattacacaaataaaaggtccaacgagtaaacttattttatacttattacttccattacgtaattaagtattatccactatcttacatattttagtttacatttggtagcaccggctagtgtttgtgttcctaattaaatcaaattatattcatctattaattaaattaaatcaactaaaaatgtcatctgctaaagataagattaatgctttaaagcaacaaattaaggaaataaaattaactgaaaagaagaagaagaaagaattatcaaagaaacattctaccaaacattcaaagaacgttattaaaaagaagaaacatattaaaccacctcttagaattatccattccgatcctgaaatgtctgattattcatttgatgatgctttttcctcagataattcccattctgataactccaattctgattctgatatttctgattccgatactgatactgatgatgataataaaacttctaaaaatgataaacttagttctaactttccaaaatttgatggttcttctactgatgataaaggcaaggaattctccactactgaagctcaacttaaagcaaaaacttggttatctaagttgcacgttaatttaattgataaaggtatttcaaaatcaagctgggctagaaaagctattgttaatctcgaaggtagagcatacaaatgggtagaacataaattagagaagaatccaaagtatttaaagatttcctgggaaagatttttacgtgatttcaaaaaagaattttgtcctgttattgaagatgatatgcatgctatggattacaagattctaacttttaaaatggttccaggaatgaaagtctctacatattctgatcaatttaaagaatatattcaagaattggattttgaagaatctactaaatttcaaatttcaagatatttacttggtttaacacctgaattgaaaaagatggtatcccaacaaaaacctcgtaccttgaatgctgctattcattatgcagaagattctgaagctattttgaatgatattgaagaagcaaaaccaaaaaatccttggatcaataatatcgaacatcaaactcctgttagacgctcttattctcgcccatatagagttaataaatataaacctggttatcataataagcaaagatttttcagaaacaaaagaccatttaaaaggtacaattcaaattttaccccaatcggtggtaatcgttccatgcatttttctcgtcctactaaactaaataataaactatctaataataataatactagttctttttcttatattgcacctccagtaagtattcaacccgaagttgatcatttaaatgtcgagaaggaagaaggtgatactgttgttaataattctcaaagggtgattccaagagatgagactattaagaagggtgattcctctgaagttaaattgttaaagggtgattccaaacaagaaacaaatagtccaactttaaacattccttcattacctgaaattttacatgttaatgctttgaatattgaaaatttacgaaaaatagatgtacaaattgataataaaaattccgcatcagcaattattgatactggatccaatacagatgctattactacaattttatgtgatgaactgttattatcaagcaagattagattatatgttgaaccaattagtgctattttagttaatgatactgttgatgctattggtgaactagatatagatattgatgttgatctatttaataatcctatcaaagaaaaaagaacatttttagttttgcaggcaaacaccaagaaattaattttaggacttccatttttcaaacaacattatgataagttagatatacatgattttattggagatagttttgcaacaccaagtgttaatgttaatttaattgaatatcatgatagacatatttctactattattaataataaagataatgattcatatctaatatatattaattcaatgaatgttgaatcctctgaagaaaatgatattaaaactattgataaagaaattaataatgttgaagttaataaatacagaaatgatattttagaaaaatttaatgatgttgttactatgaaagaaccaaatgaacttcctcctaaaagaaatcacgaacataaaattattttagttgaatctaataagcaagttaatagaaatcaatatcctttaagttattcagaaaaggaagaattaaccaaaactgttgataagttaatacaacaaaaatttattagaattagtgatagtccttataatagccctgttttatttgttaagaaaaaagatggaaccatgaggatgtgcattgattatagattgttgaataataacactgttaaagatagatttcctttacctcatatagaagaaattatttccaagtttgaatctgctgttgtttattccaaattagatttaatgtcaggttattatcaagtaagaatccaagaagaagatattccaaaaactgcttttagtactgattatggtcattatgaatgggttgttatgccttttggtcttactaatgctccagcaacttttcaacgtatgatgaatactatcttatccaaatatttgaatacatgtgtgcaagtttatttagatgatatttttatttattccaaatcttataagcaacattatgaagatattaaaagtgttttatctacattaagagaacatcatttaattgctaagaaatcaaagtgtgccttcttttacgatgaattaagatttttaggtcatgttattactaaaaatggaattaaaactgatccagataaaattgaaaaggttaaaaattggccaattccaactactgtcaaagaagctcaaatgtttataggtttaacttcatattatagacgttttatcaagaatcattctaagattgctgtaccaattcataaatttattaccaaagaatcaaaatgggaagatgaacaaactaatgcttttaatcaacttaaagacgctttaattaacagtcctattctagtacatccaaaatggaataatgattgtacttatgttgttcatactgatgcttgtggtagtgctttaggttatactttagaacaattagatgaaaatggtaaaacaagaggtacaattgcttatggttctaagaaattaataggagctcaattaaattatggtatttatgatagagaatttatggcagttgtagaagctttgaaaaattggagatattatttattaggtagacattttgttattgttactgatcataaaagtttaatttatctacgctatcaaaatttgattgattcaactagggttgcaagatggcttgattatttatcacaatatgattttgaaattcaatatgttgcaggtaaagataattctgccgcagatgctttaagtcgttatccatatgaaaaattgtctgttaaagatgctttagaagttaatcatattaaatttttaggtaattcaaatagaaattcaaataataatattcaaattaataatactgaagttactgttactacttttcctatgaatgatgaattaaagaatttaattattaaaggttataaaaaagataatgtacttgctgatgtttattcaactttgaaaaataaatctgaaattcctattcatttaaaccaccatattaaacattatcaacttaaaaatgatttactttattataaaacattattagaacaagattgcaatagattagttattcctcgttataatagtttacctcaaagatttattaaaaatgctcataataatcctacttctggtcattttggtccttggaaaacttatcaaactttaatggattcattattttggtttaatatgatgcctacaattaaaaggtattgcaatagatgcattgtttgtcaacaaaataacacttctactcagaaaactcaaggattatttcaaccattacctgttcctgaaggtagatggactgatgttacaatggattttgttactggtttgccaacaactacttcaaatcatgatatgattatggttattactgatagattttcaaaaatgtcacattttattccaactgtgaaaactttaactgctgaaggttgtgctaaattatttttagattattttcttaaacatcatggatttccaaaaagattaactagtgataaagatattaggtttatgaataaattttggtatactattcattttttctttggtgtttctttattgttttcaactactaatcatccacaaactgatggtcaaactgaaagagttaataaagttttaaatcaattattaagaaaacattgttcaaatgatcatttacactgggatgaatttttaccaatgtgtgaatttgcttataatagtacttaccatgattcaattaaatgttctccttttgaattagctataggatataaaccagattctatgaaaagtgttaatagttggaatttagatgataatagatatagtccaaatgctcaagaatatgctagacgtatgagattaactttaactcaagctcaagataatattgtacaagctcaaagattgaatgaaaaatatcataatagatcacatagatttcataattataaagttggtgattatattttattgcatcgtgatgcttttggtgcttttgctaaatattataaaattcaacctgcttattatggtccatttagattggtgaaaaaaattaatgataatgcttttgaagttgatttacctaagattaataaaaaggatagagtattaaatattaaaaattttcgtccatatgttcctccagtcgatttattatgtcgtccacctagaactaatgctgaaattttatcaagaattaatcaaatgtgtggtattgctggttttgatgaagaaaagaatacttttgatgtttattggagagattgtgatcctttacttgctacaactattactgctgatcaatttaatacggcttcggaatcacttcgtcatagtttatttcataatgccaagatgatttgtgctcatgagcaaattgtttaagtatttgatttaatttaattttaacatcagggacgatgtttcccaacagccggggtaatgtaagggaataaatacaagttgttcaataatatccacgtgaagattaggtaagctgattacgtaaagatgataagatggaaataggaattccgagatacggaggttcggagatgtcggagtaagaaaggaatgacttagattgaaattgaattaattatgataaggagtggtatgattgataaggaatagtttaattaactatattaaggaatggttaatattgtaatataaataagtatgatatcctgtataactttgtataactctcttctgagaggggacattaatcagagtattagttagagaacaatctactaattaataccaaccgtctcattgctactcgctgtctattacacaaataaaaggtccaacgagtaaacttattttatacttattacttccattacgtaattaagtattatccactatcttacatattttagtttacagtataacaactgggaagttagtgtagtggttagcataccagccttccaagctggtgtcatgggttcgaatcccgtacttctcattttttaacttattatttatttttgttaaagtgctgattttttcaagtttatacccagaccgttattacatgggcgtagacctggcttaactgtttttcataaccgttatatattcattaggttattataatatattttcaaagatcaaaagttaaaatgcaaattaaacacaagttataaattttttataaagttatttctataaaatttagctgaagtaagattggtatgcagataaagaagaagcaccacctaaatgaacatataaaatgtttgaaccttcttcaaaagcgtcttctctaactaattggattaaaccttgcatagatttaccttcatagactggatcagttaaggtaccttcagttgaaccaagtaatttaattgcttcgatagtaccttcatttggaataccataaactggtccaccaaatctactatctaaattgaaagaatcaaatttcttgtttaaaccaattaattcagaagtgtgattaataattcttaaggtttgttcaaaagtgttttcaggcttaccagaagcatcaattgcaataacatccttttctctaccatattgtgccataccaacaaagatacctgctgcagttgaaccagtaacacaacagacaacaattttatcaaatttaatacctaattctttttcttgttgaataacttcatcagcaaaaccgacaaaacctaaaccaccatatttatgttcagaacaaccagctggaacaggatatggtttgtaaccttgttcctttaattcagaaagtgcatcatcaaaagattttctcataccaatatcaaatccatcaggaactaaacgaacatcaccacccataattctagcagcttcaatattaccaactttatcataagttgccttttcagcttctggaattggaacccagttttcttgaacagtaacagcctttaaacctaatttacatgcagttgcaacggtcattaaagtttgatttgattgaataccaccaatagagacaatatgagtgtaatcacctgctaaaatatctggaacaatatactcaaattttcttaatttgttacctgcaaatgctaaaccagagtttctatcttctctctttgcataaatattaaccttaccaccaagggttttagctaagttttcaaatttggagattggagatggaccaaaaagtaagtcgtatttttcgaatttgtcaagtaaagccattttgtttatataggtttgttttgtgtgtttgtttgataataataagaaagaaaaagagatattaacagaattgaatcaaaatggaggagaaatgcctggcttttatactaatcattctactataatacctccaacataatccaacatcaatgaagtggtgatctagcaacaatgcggcgattaaacaccgcatttcccaattaagaaaatgcggcgatgtaataccgtcatttttcacggtgagtttttttttcacgggaatatactttcatgaacaatgcgataagaaagtcgttagatttttattggtactgttatttacataaaacgatatatcggtaatatatatttctgttatctagtttttactatcgataggcattgattcgacttcatcaactttctctttattaacatccttttctttaccattaagatcataaataccattatcaactttttccataataaaccaacagactattgctgcaacaatactaacaccaagcattaaaattaacatcatgttagaatctctatataaacgtgccctatcagctttccaaccggagtacaatgcataagttgccgtaacggaacctaaattacccaaacctgaaacaattgcagcagaggatgcacatccaacatcaccatatctatgtgtcataatttgtgctgctaacgtcatagtaataggaactgttggacctaaaccaaaaccatgcaattaataaaccagcatatttattccaaggaccatgtgcatacgatgtgaccaataagccagtgataatgattaaagttgaaaagatgaaaattgcatgtcttaatttcttaaatttatctgcaataggagtaattcaataaaattgaagctaaatcaaataagccaaattggtgcatataaaagagaaacatcaatacctgataaaccttggatgatttacttgaattaaagttgttgcaaaaactgctaaaccataacctgtaccaacaacaccaaaatacatcatgaattaatggccaagttctaaaatcaattaaaacattcgcaacatcctttaatccccatctaatatttttgtatctatatttcatatctaaatagtgcaagtcttttttctctactagttaatggttgagttggagtaaaatatttcatgaattttggaaggaatatgttctcctaaaacttaacatattagtttcagtggatttaaggtaacgaggtctatcaggcaaccaccaaattagtgataacccacatgcaatagtaaaagcaccataaacaatataataccatttccaaccagtataaaccattcctcatatcaattttctggaaaccagcagcaactaaaccagaagcagatgcagataattgtgcagcagtgaaatagtaaccaattctacgtgctgttctatgttccgggataccataatgaaatataatatgataagtccgggccatgtacccgcatcagcaaatccagtcataaatctaattgcaattaatcctttaccattatttaatgcagcataacagatataaacaattccaacaccagtaataattctagataaccaaacttgaggagatgctctagtcataatcaaattcattggtaagtcaaagataatgaatgcaacataatataatgctgaagcaggttgatgtatcacgagctgaaagatttaatgaatgaataagtgaatgaccttcttcataattcatagtcaatgtattaccatatagagatgaaccataagatgcaaagaagtataaggcccaacaggctggaatgatacggtaatctaaacgtctataaataggatccatttccttttctgttggaacataatcttctggataagtattgagtaattcaggatcaaatgtcatttcggagttggagataatttcattacttgatagttctaaagtttcagaatgatcatcaactgatgaacttttatgcatttcagtatccatagttgttttgtaaataccttttggattgtttaaattaagaaaagaaaaagtagataaagcaaaaaaatatagagttgaagttagttgaatttgtattgattaaaggaacaagaagtgaaatttatagatgaaaaataatttcccagatggtcatttttttcagtttcccaacgaaactgcgcgagtcaatggaatcatttgagtcaaaaattgaatcatcgtgcgactcattttgactcacagtgggtagctcaacatatttttaagtttaaattacctttaattaagattgtctgtaattacaacgatttgtagcagttaattaattttttagacctttttatgaaattcagggtttttttaatgtaaaattaaatttttaaattataaaattatatattgtaagttatgtaagattgaattaaagtagatcgaattcaagtagattaatttgaagtagattatattaaaaaagattatattgaattagattaaacaaaattaaattaaattgaattagttattattagaaattagaatattgggaaaaaaagtattatatgaatttaaaatcattagcttgtcatcaaaaattaagaagtttcactctttgccttttcagtgttatcactatggaatgaagcattacccgtttcaggttcttctgtaacagggttctttgtacttgtaggagaataagcatattttgatctttctctaatctttgcaccaaatttatagaaaaggaatggaattgcacaacaagcaagagaaatgaatgccattaatgatgaatgcccattcataacctaatctatgatacatttgaattgtaaataatggaacacaagcaccccaaattgatctaacaaaagttttggcagctaaagcagaagcagcataatgttgataagaatcaacaatataattatttgcaggattgtataaacaattgaaaccgaaaccacacgcaaaacctgagaaacatggacctgcccaactaattgttggatatgatgaccatccaaatgagaataaaccaattggaataaaccaacatccaatcatcattggaattaatctcaattcagccggtggtaattctcccttttcaatatatttagcagataatctattatacttgtttattaaataatggagtaatagcagttgcaagtaaaacacctgcagcaattggaataaacatcaaaccagtttttgaagctgaccaacctttaccttccataaaaataacagggaatgcaaagaagaacatgtataataaaccgtaaataacctgacatataaattgtaattaagaaaacaattaattcagataataaaatcattggtcttgctaaagtttcttttgcagtttcacttaaagttcttgtctttaattcagttaatgatctataagtatcatcatttgttaattttccttaactttttagctctaacttttaaaatcttgagaatgtgaagtttcaggtaagaaaacgacaacaaatgcgtagacgacaccagagaaaatcagcatgaacccaatataaccatctccaacctacattatcaccaatataaccaccaattaaagggaccaacaacaggaccaagaaaaggtgcagcactaaaaactactcattgcaacaccctctatctgcaccttgaaacatatcagccaaattaccaccaatcaaacacattggagcagagaatgctaaaccatcaattaatctacagactaataaagtaccaatatttttagctagcagcacaaggaataataaagataactgccaagaataacgtcacaatataaacaattcttctaccaaattcttcagataaaggagcaaataaaagaggaccaaaaccaaaacctaacacaaataaggtaacagttaaaattacaacttcttgagaaacaccaaaagttttcattggaccttcaatatcaccagtaacaattgctgaaccgagagcaacatcaaaacagacagtacctaataacagagttaaggaccattttttcatatttgaccaatttcttggatcttgtttatcgttataagtgaaaacgactaatctcatttgagtatctaaatcaattggatatttccaaggatcattttcatggaaatctgtttttggatccattttgaaatcagttgttgttttttccaaatcgattggttgttcaagtggacccattgaatccataaccatcaagttctaaattagttttcagtttagtaataccttgggaattttgcgttagtaatttttgtaatttttcattctcttccttttcatttgaatcttgttcatgagtgaaagatttgattaaatcattaatttgtgatttagtttgttgtaatggagtttcttcaatttcttcttcttgttgttgttctctattattattgtattccattgcattattagaattaaaagatccaatctcagtatcaaccgagtgcagtgaatttatttcattgatatttctattaacagtactcattaccgaaagtgataaaaaaataaataaattaaatactaaagataattcaaataaaataaactataatccataaatttgaaaaaagtgtaccttatacttccttttatacatctcattcaactatatataatctgaatggcaaaatatgtcaaacaaagggtctttcaccttttaatgactataatatatatatatatatatatatagtaattcaaataaatcggctcacggcgtgtatatcgcacagccgtaccgaagttgagccctttttttctcacccctcgtttctttttttgaaagagttctcaagcacctcggctatttgggtgatcccgccgtgccgatatcttactatttaatggtttcttatatatttcttatattttatattacattctatacatgcacgttactatcgatatattaaagtaccaacttatcaagtactttaggataacatctactgatttcttggaattcaaatggatgactctcttggaaaacagctggatctttgtttaatgcaaagaagaaaacatgatgatccactgacaattgtaattattaaaatacttgtaatattgaatgtaactaaaaatgaatatcccgctaatggaaggtaaactgcatcatctaatccaaagattgctctgaataattgccaagtaaacacatgtaattaataaacttaataaacttgcaattaaacaataaaatcccaatgctgcactgataattgagtcattaagtattgcctgtaatcctctttgtgagagaaatttcaatgtactcattgcagatctagccatatcaactccatataatgaaacatatgaatatgcatataaattgaaatatccaacacataattccattatttttaatattatatcgaagaaatttccaacaataccaaattttttatcaccattagtcacaaaaattgcccaaacttgaaagaaaacaacaaataatgaaccaaaacagacagaaccaaaattgtatgtcattgctctcttgaatgatcctaaaccttcattacttggcatacctgtgaatgtactatttgaataataccatgtaccataaataccaccaattgtaacatgcatagcatttttcattacatcaataacatataatcctgcaaaatttaagaataaaatagtaaaaataagtccacctgtaactttggaattttcatcaattctttgtccatcactgtgaaatccatatgcaatatatgcacaaccaattgaaattgttaaaattaatgtaaaaatcaaacttgtgaaaaatccaatcaatgccgcaattgctgtacttggatactttttcaacacatcaataacaatacttaaaatatgtgatgctaatgtaattaatggttgatattttttgacaattaaaattaaaacacctgatattacaccaaataaaataacctgtaaaatttgtccaactaataaagatgccgctgcagccatgaggaaaagtccaattaaaagtttaataccaaaattaacaaatctttctgagcttttaccagcattcaaaaatataaacattgaactaccaaatgaaatcaaacttgtaaataaaaataagaaaattgtcttgaattggaaaaaaacactatttggtaatgttgcattgcctgaattatcaacgatatatttgccaaaatatttaaccattaatgtcattgaagtaacaataagtataaataatattactaggaagataactgcaaatttaacatcattccaaacaggttttgatgcagtaaatctatcctcttgaaatgaaaatccttcaatttcatcaccaccatcatctataccatcaatgttaaaatcatcatcattgaagtcacctggatcataagcttgtgctcccatttccgtttcttccgatacatgctcatctccactttgtaccagaaaatcattatcattatcgttattgtttccagtgtcctcagtttgttcattatcagtataattaccatgatttctattcaatcctgaaccaattggttccggttcaacttccctaatgttctttatatcaggattgctcatacttgtcattgtgtatcaaattccaagaaaaagaagtctcatcccaagtttaacacgttacgcctcttcaattcaatttgactgtcattaaaacaccttccgagtaaatggaaatttgcgcggaaattaattgtttataaccttctattatatatacagtgtctaattatatacagtgtgcatacttcttatttaatggtgttgtgtctatgacgtgaagatggtaggtacttggcaatggcaagatactctctaggatgtgtccattgtaagatatcttggttttctattaaacaaacaaaaaatacatgaacgaatgcatttatcattgttgtaatcattctacaaatttgcatagcaaaaattccacttgctactataatgtaccattgtaaagaatcaccaattattaaggaatgtggtggttgttttaattgctgtattatgcaatatacaactgtagacgtaagaatactcacaaatactgtgtatatttttaaaaccagtttgattatggattcactaactaatgtacttaaccctttggtattgtacattttgtacattttataagatgatttcatgtagtttttagagtgaattgacatatacgcaaatgcatactcattaaaatattgtactgtgtaattaatcaacaagacaagcattttaaaaagcctccatagaagtttaacaaatggatatttcataatcttatcatttggtttactaagaagtattatatctttcaacagactaacaatactagcaaataatgatccaaaacaaattgatccaaaacattttgaaaaagtattatgaataacggtaatatctttaacatttgattcataataccatttggcacaaattgatccaataatcacatgaaatgaattagtgaaaacctcattaaaataatatccacaaaatacaacaatcatccacattccatatcttatatttaaatcagattcttctttccatttaagataagccgcatatactataattgaatatactaacattccaatagaattgattacaaacatagctaaataaatcaaccaaattgttatatttgatcttattattcttgaaccaattttaacaatttcaacactaaaagcaactttattgtataaaattgtaattaaaaggtaaaatcccatcattattgcaagtgttgcaccacaaagaacatactgaaattgataataaaaataaacagctaatgaagtgaatgtgaatgtagacaaaacaaaaatacatgttatgaatattcgatagaaaaataccaaaccaattaattgtaaaatactcagtattaaacaaattgataaactaattccaaagaataaaccaatactgtaataattgttcctaatatcattatcaattgcatatttaaataataataaattaaggttacctttatttaattcatagagatatgaaagacaatcattggatactgttacaaatacacaaagtattccacctaatacaaatatgaataatgtatcatgataacgagtatttgtatattcccaaggtattttacgttgtacgaagtggctttgttcatgaagatgagttttatctgagtaatctatgtgtacagatggagagttttgagtgtgataagtgtctacaagaagtgtaagccggtggaggatataccggttctacttctatcttctgcaaagccatgagtttatgtccttcaagaagagcagtggttgttgacctatcagtgaatgcaccccacagggaaacaaacgtcaataaagagaacaaaaccaaccggcgcacagacgcagaattaattgaaatttgaaattttttggctgcttctttttttttatttcattttgcagtacagtaacatcagaatttcaattgttctgtgattggaatggagtttataaaagattagcagttattcttttttatttgtttctttgaggttctctctcctcttttattatcaatctctttttacaaacaggtgcaatcatgtctgaaagtgaagccattttccgctctgcggaaatgtcaatgattcaattgtatattcctaatgaaatagcaagagaatcaatttattcattaggttcattaggtttagtagaatttcgtgatttaaataaaaatgtcaatcaatttcaaagaacttttgttgatgaaatccgtcaattggataatgttgaaagacaatatagatttttgattaaattaatggaagaaaatggtattacaccaccagaaactttagcagaagattatgaagcatctcataaaaatgcattaacaacatctcaattagatgaaattattgcaaatgctcaaattttagaagaaagagtaactcaattagctgatgcatctgaaactttattgaaaaagcaaatttatttaaaacaatatcaacaagttttatcaacaagtgatagatatttctcatctgacgtttcaaaagatttgaatgagttgaatgaaaacgaaaataataattcttctgatccaattgaaactccatcttcatcatcatcatcatctaatttcataacaggtgttattccaagagataagattgcaattttagagaaaattttatggagagttttaagaggtaatttattatttaaaacctttgaaattgaaaagcaaatgtatgataaaaaggccaaagaatatgttaataaaaatacttttgttattttttcacatggtgaaatgattctagaaagaattcgtaaaatttgtgaatcattagatgcagatatttactttgttgaatctgattcaaaattaagaagaaatcaacaagttcaaattaatgataaattaactgatgttactaatgtcttagaaacaactaatttaactttacaaacagaattaagagttatttcaagtgaaattgatgattggattaaatgtgttaaattagaaaaatctgttttcgttacaatgaataaatgtcattacgatttaaatagaaaatgtttaattggtgaaggttgggtaccaactgatgaattattaaatattcaaacaactttagaagattgttcaaatcaattatcttcaaatgtttcatctaatgttccaatcattatgaatgttgttaatacaactaaaactcctccaacttatcataaaactaataaatttactgatgcattccaatcaatgtgtgattcttatggtattgcaacatatcgtgaagttaatgctgcattaccaactgctgcaactttcccattcttatttgcaattatgtttggtgatttaggtcatggttttattatgttcttagctgctttatgtttagtcttaaatgaaaaatcaattggtagaatgaagagagatgaaattttcgatatggcatattctggtcgttatatcttattattaatgggtttattctcaatgtatacaggtttcctctataatgatgttttctcaatttcaatgtcattatttaaatcaggttgggaatggccatctgattttaaagaaggtgataatattgaagcttataaagttggtacatatatcattggtttagatcctgcatggcatggtgcagaaaatactttattatttgcaaattcttataagatgaaattatcaattttaatgggttttattcatatgtcatattcttatatgttctcacttgttaatgcaattcattttaaatcaatgattaatattgttggtaattttataccaggttttattttcatgcatggtattttcggttatttagcagtttgtattgtttacaaatggtgtgttgattgggttgcaattgataaaccagctccaagtttattaaatatgttaattaatatgtttttagcacctggatcagttgatgaacaattatatccaggtcaagcaactgttcaagtatttttattaattgctgcattaatttgtgttccatgtttacttttaattaaaccattatggtttagacatcaattaaaacaaaaatcaattgcattaccaactgatgatgttgaaaatgatgataataatttattatctaaccttgatattgtcgatgatgaagaacatgaagaagaaacatttggtgatattatgattcatcaagttattcatacaattgaattctgtcttaattgtgtttctcatactgcatcatatttaagattatgggcattatcattagctcatgcacaattatcacaagttttatggtcaatgacaattggttcaagtttttactttaaaggatttggaggttcattatttgttttcattatgtttggtatgtggttcgttcttacagtttgtattttagtcgttatggaaggtacttctgctatgttacatgctttaagattacattgggttgaatctatgtctaaattctttgaaggtgaaggtagttccttacactccttattcattcacttcattattaaatgaaccagctgaatgatttactatttaatatactctataattaagtatacaatttataaataatcaactattactcacattcaaatcattatagtaatcaatgtagatgatcgtttccagtggaattgtaataaaaaattttttttgatagagtaatttcactcaatgcttatgtaaccaatccggaaattctgtaatgccgcttgcggaattaccagccggctgtaggtaaataatttccctagcggcattctttagtcttgcaccacccttctatcgtgataactttagccacattgcaatagataacgtaattaagcatctctatcttttcattttttcacaccacaagccattacgcttgaacctaacattagtaaaattccctcctagcttcaccgttgcaacatggtgtcaaaagtgacacaatttgctgtcaattaagctaaccggcgatttccatgaaaatttttaaattttttaccgcgagcatagcgggatactgatgagtttcatctttagcgggtcagttgctattattattattataataattttcttagtatcggagattcctaattaataattagtcaaaaaggtgatggcatatcctgtaacggtcagaatctcccttaagccgagtaatactcttctagtgtaactggttttgttggtacaaagtgaagtaactggcctataagaaaggagaaatgatacatctataaacaccaagaggtaaaattactgtagaaacaatagaggatgtcaataaaaatttgcgaatttatgctagcaaatcttgtatattttttttacttgagtcattattggttatccgtccctatttttacttatctttcttatctttattatctttattatctttattatctttaattttagttatgatcccgaatttttttttttaattaaatgtggagactattaaaagaacctttaatccatcttaaagatggaatgatcatagcatccttctttagatcgttctatttctttcttttaggttattttctttgcaaaccagtctttaacgaaaatgcatacggtaagttcaggtcatcaacatcataattttgcaagtccagttactacaagattagaagaaattgtgtccaatgaagcggagttgcgtgatattgatgcaactcacactgtcggagatgaagatcttttggctaatattggttataaacaagaattgaaaagaactttttcaactttccaagtttttggtattgcttattcaattatgggtgttcttccatcaattgcttcattatctagtttaggtttaagtgcaggtccaggtgggttcctttggtcttggtttgctgcttcaattatgattatttcagtctctttatcaatgtcagaactggcgtcctgctattccaacctccggtggtttatattattggacttattactatgctcctgaaaaatatagagttatcttctcatattttattggtttctgtaatgcaatggcattatgtgccggtttagtctcaatttgttatggtaatgctgaagaaattttagctacagtttatttatctcataatggtacttttgaaattacaactggtaaaacttatggtgtgtttgcggcttgtgttgtatctcaagctttttgtacttgtctttcatcaaaaaatattgctttattacaatcaacttctgctatctgcaatactggtattattatcttattctttattgctcttccaattggtaattctgttaatcatcatggatttaatgatggtaaatttatttttggtccaagttaataatttctcagattggccaattggtttccaatttgttctttcattattcacggctgtttggacaattggtgcatttgattcatgtgttcatatgtcagaagaagcaaagaatgcatctcatggagttccaattggtattatttcatccgtctctgttgtttcaattttaggtttctttattattattgttattaatgcatgtgttaaccctgatattgaatcggttattggttctgctactggatttccattagcacaaatcttttatgattcattaggtagaagatgggctattgcatttatggcattgattgcttgttgtcaatggttaatgggtgcttctatcttaactgcattatcaagacaaatttgggcatttgctagagatgatggtttaccattctcatcatatgttaaagttgttcatccaaaattaaaagttccaattagagctgttatttttgcaactgctatttcattagctttaggatgtttatgtttagctggttctgctgcttcatccgctttattctcattagcagtttctggtaactataccgcttggtgtacacctgttttattaagattaaccactggtagaagtagatttactccaggtcctttctttatgggttatttctggtcaactttaaacagtattattacatgttcttggggtattttcgttattgttatttccatgattccagccaataaaaaagttaataaaactgatatgaattatacagttgttattacttgtggtgtttggattttatcaatgatttacttttttatttacaagtataaatactaccatggtccaaaatctaatttaaatggtgaagataatatttccagtgaaagtgaagctgaaaaggtacctgctgagataggagaaaaaggtgttgcttcagtctaatgaatatattaccgttttgtatttacttcatatttaatcattatttaattttctaatctattcatattttgaaaaatcacttctacttatttaccattactgaacttatattatacagcatatactattattatcagtcaagatccattgatcgatgacattaaacttataattaaaatgctattacgtaatacttaaaaaaatcttgggcctaaaatctaccaaccaggatgtcatgaacaaacggattattcggatttaattttaaaactcttccttagaacattacacattctacactctagaacaatgacggaggaagcttcacaagaaataataacagtaaagtccaagattagatccaaagaagatttaaaaatattccaatcttcagaaacatacaatgatcttctatcgtttgtggtaagattagcaacatccgtccatggaattgaacttacagataaatcattaccaagaccatcacaaatagaaaaccttcttactatttttgataaaattgatcaaataattgaacagaatccagttaaagaagaaacaagtagtagatttggtaaagttgaatttcgtgatttctataaacaactgcacgattcattacattcaatgatatcttcattatcaaaagattttacagagcaacagatatttgatttaagtgaatatttaggaaactcatttggggatcaacaaagaattgattatggttcaggtcatgaattaaacttattatgtttccttttagctcttgataagattggatacttcccagaaagtcacgaattagataaatcaattgttttaatagtattttctagatatttgaaagtaatgcgtcatttacaaacactttattggcttgaacctgcaggatctcatggtgtttggggtcttgatgattatcatttcttaccatttttattcggagctgctcaattatcaccaatgaatagacctagaccattgagtatacataatttagattatgttgaagaattcaaagataaatatttttattttgcttgtgtggattttattaataaagttaaaacaggtgcagaaagtttgagatggacatcaccaatgcttgatgatataagtggtgtaaaaacttggaagaaaattgaagagggattgattaaaatgtacaaagctgaagttttaggaaaattaccagtagtgcagcattttatattcactaccacattaccatgctctgaattgccagatcacgatggtgatcaagatgaacatgatggtcatgaccacgcacatggaggttgttgtggatcatcaaatatagacaatccgttattatcaacatggggtgattgttgtggtattaaagttccaagtgcaattgctgcaaaagctgctcaacaaaataaatacaagataccttttgattgagcttttgttttacagtaaatgattacaatcgaattattagaaacaattttaatttaaatttgttttaaaataagataattataaatagctatttaggaagttggaaataatggtatatagttttgtaaaagaacacttgcatttaagcaatggtacaggtacacatgttagtgtttaaagtacacatgtaaccccaagtatcagcatcttggttgtcatcggttggtttgttttgggtagctgcaactttagaattcatttttgttaatttggttttgttttttggtttgttctgaagtgaacaaaagtatggaagcaaaataatcagttcaaaccagaagaaatcttcagtatttatagtatctaggagttaaacctactccaagtcatgttaaactattttgttcaattgaagtgacccaaaaaggaaattttatgaattttatttcatcaacctagatctgaatctcattgaaacatcatctttttgattttaaattgatatctgttgtttcatctacttgaaatattgtatcatatgtttaatggattggcaatgatctacccacgcacatgtctctttaatactctgcttttgaatctatctatcattaatatcaccccccaataaagaaataatcatagtgacttggatttttgctactttgttcacattaagattcattttttacagttccaacataattcttactgttacatatattacaaaatagatcttaagaaattataagtttagtattgttttgaaaccaataataactttacagtattataaaaacgtaatatttttttaataagaaaataaattgtttaattaaatcagttctaaaaaactataaacgaatggagaattataaaaaatcgaatcaattaattcaaagcattgtaaaataagatttgtaaaattaagcaatggtacaaggtacacatgttagtgtttaaagtacacatgtaaccccaaggtatcagcatcttggttgtcatcggttggtttgttttgggtagctgcaactttagaattcatttttgttaatttagttttgtttgtttggtttgttgtatgatgtagaaaaaaaacatcaatcaaaacttctgaattctttgaaaaataccccagtatttataataagtaattgaatttaattgaaatgatattaaaagttccagtattatttctgtaaaattcatagatattcattgaactatcctaaaagggtaattttttaatttatcagcactttttcaattctctctcatcatatacttttgaattatcaaacacatcacatttcattgaaacaaaaccttatctttcaatgcttttactattcccctttagtcagtaaatattaatgttatttagttagttatccttttacggataaagtggtattttcaaaaaaaatattacgtaatgaatttaggtgatatgtctaaaatcattttaaacggcatcaataatattaaaaaacatgaaattaattacatagttaaaaaaatacatgtaatggtgtacgtattcaagcggatttgaaatggatagcatgatttactttagcataacttattcaagtacaatataatattacttaatactgtacaaaagtagttttattttataaacttttgttaagtttttgtaaattgttaaattaaacatgtttttatttactataaacgaaggaagaattataaaaacgtgagtcaagtagtctggagtcttgtaacgttaaaagatgtacatttaagcaatggtacaaggagaatataaaacaccagctcttatataactcatgtcaccccagctattagcatcttggttatcgtcggtttggttgtttttggtagccgcaattttagagttcatattagatagttttttttgttgtttgtagtgtgatggagaaagataagaccaaatacagcctctaaattatttagagaatactccggtatttataaaagtttaatcctgttaatactgaagtaaatcaatataaaagcaaaagtttcagtttttacctgtaaaaatgtcggaacattatcatgttacgtaaggtttttcatattaaatttatcaccatatgttattgccggtaaaaccttattttttgatggattgctatgtgtcaaatttaatttaatttatgattgctattttctcatatgaattccttattaggaaggttaattacagaatacaatggaaagttaattaatcatgtcatttcagttaattaataattaagtctggtcaagattaggaaagaaattccggaagaaagagcaaactagtttatgaactaatatatcttaaaatggatataaaacgaacctatttcccactttttagatattagtcaaaactactttatatttgtatttactttattttactttaattatatagtttttataaccatccaattatttaataaaactagcctagctactttaatcgaataattacccaactccaaccaataagataatattgacaactcacctatattgttagtgttattattcaaaactattaattaacttattaattacaatctaaactacttaatctacattaagccaatttaactgcaatctattattattattacaaggtatgtatatacaaaaatcttggataatcattgtgtgatccaaaagcagtaatttttgatttctaccacagttaaactaaatagtgcttcaaacttttgaatccaaagtataaaatatttttttgaaaccaaacccaattgtttctgattgtttctacaatctttctactattttcttctattaatagtattcaattaattatcctttttgggataagttagctttttatcttattacgtaacaaacttaggactaagtttgtacctgatacgacagagcaaccaataattaaataagccgtgattataattacggtatttgtttgcagcttaattgtgaaaattaaaaaaaagcaaaaagtcatgaaaattttgaatagaatggataacattttagttttggcataacttacatgattgcgtcatgacaataccaagtgattatagaaaaataaccaaagtacttatacaaaagttttttaactatatgaatagtaatctgttaaattaaataagttttaaataactataaacggatggagaattataaaaaattgaatcaattaattcaaagcattgtaaaacttgtgaattgtgaaataagagttgtaaaattaagcaattgtacaggtacacatgttagtgttcaaagtacacatgtaaccccaagtatcagcatcttggttatcatcggttggtttgttttgggtagctgcaactttagaattcatttttgttaatttagttttgtttgtttggtttgttgtatgatgtagaaagaggatggaaacaaaatcattagttaaaaaaagaaagaacctttagcttttataatttttagtttgactaatttgttaattaaaacaaattatgataaattaatcgttcttgtaggtatacccattgatatgtcccaaaaaggaaactttttatatttttactacattgctatctattttttaaattagccttttgttacaaaaaaatgaatctgcaatcattccacatgttttttatttgtgaaccataattagatgtttgataattacggatggattggagaattacatctttgattgtattgtttaattacatttccggatatagttatattatttattttgactttttatttgatgattacattgattttaagacatatttatttttattattttggtagttaaatctagcaattaattttaattaaagaaagttatatataactataaacgattgaaaaagtataatgagtttataacattgattaattaagcaatagtacaagtacacatgttagtttgtctagtgatttcataaccccaggtatttgcatcttggttatcatcagtttgattggtttgggtagcagcgactttagagttcatttttgatagttttttgttgttgtttgttgtttgatgtagaaagaagaaagagaaaacagtaatttgaaagtttaatctgaggaattaaccccatttttatattattctgtagtgaaattttaccaagatttgaacaaagaacaaaagagtaaaaagatacattgatgaatccccaaataggaaatttaatttgtgatgaatcataaaaacgagagaactgtttttttagcttttcttctccgttacaataaacatttaattttgattgattactttatttttttgaatttgaaacagttgattgaagctttttttgttttgaactcattttcgtaattaaaattatacagaaaatttagatatttacgcataaagatttttgatatcgttaaatgaactttttgtatgatgaagattaaattaaataagttgaaataactataaacgagtaaaataataaaattgttataaatgtatatctgttaatttaattgggtcccttaagcaatggtacaagtacacatgttagtgtttaaagtacacatgtaaccccaagtatcagcatcttggttatcatcggttggtttgttttgggtagctgcaactttagaattcatttttgttaatttggttttgtttgttttttgttttgtgatgtagacagaaaaagaagatttggagtttattgaactaggcagaaaacgagctttatttatagtaataattcagtagtggaacattgtaaaatggatggtctagctatattaatgatagtaaccaaaggtagccattaaagtttctcaaaaaggaaatttttgaaattttgagatttttagatcatgatgtgttagtttcaaaaattaatgaaacataaacaaattgttttaattaacaataaataaatgatacatcattaactttatcaaatatttattatgatgtaacatagtaaaaataattgctttattaaatgctgaatatgattagattagtgtacatattttacataataattttctatttcgtaaactattaaaattttgattaccatccaaatctcaattgagatgcagtaaaaacaggtggtttccagataagcttcttcggatctagctgatgttttttctttttctttaatttatcatgagcttgagccacctggtcagtaatacaaataatatgttgacctttgtaatatcttaacatattcattgtttgtaaagtatgtaaaatatcagtggttgtcatggaagttttctgggaaatttcttcaacacttatctccgcaggcttagtttcaataagtaaagctgcaattgtttcagcccaataagctctatatgatagtaaacccaaatctgataaaggtttttcaggtgatccattttttccttctctttcagataacatgtaagaaaattgaattaataatttaccataaccatgtctttgatattgaggaagagttaaaatacaagcaacattataaccatcggcactttccttttcctttgagaaataaccaactaaatgatgacctaattcatctcttcttgtcatacaataaaaaaggaaagggtcaacatcatagtataaagttttatgatcaaggaataatttagaaagtaaacataaatttctgcaccaagttctttgatttcgtccatcaatttcaaagaatgaaactttttcatcacgataaatctcattacccggtggatgttttaaagtacatttagatcggaatctttcaaactgctttttcgatccaaaatattgtaaagaaaaatcacatatgaataaagaaccttcgtcagtatattcgattggataaggtgagaaataccagggttcaacttcatgattaccaataataatatttgtaaaatttctaattttagctaaagcattaacattattttgagtcattgaaccactagttctaagttttttaatttcatcctctctacttaattcttcaccttccttcaccaaaccttgaacatttaaattatctaaatccatttcatcatcattatcaccattatcattatcatcttcatccattttatcttcagttttcacagacatttgacgatctgattcaataggagtactactcagttgagatctactactgggcacactactagcaggagttttcttcttttgtttctttgtatctttctttggtgattgagccttaggtaatactaaaggtctgtgaaaatctatattttcttctaatgtccattcatccaatctcttattaaattcaacataatgaacataatatgatggtttacctcttcgtacttggaaagccagtatctctgatagtctataattatcatccttaagtacaaacactttaggatcctggtacaatactactagccgtgaaaaggggttcagttgtacgtttagggggtatcaatgctgtagagtccaatatatccaagttctcagtatcagaagtcattgttgtaccgttattccaatatgagaaacgccgtaaatatcttcccaccagtggcaacgaaaagtggaagaaacaagaaaaacatgtagtcaacaacaacaaatttcctgtcgttaatgaaacccagtggagcggggctcgttgaccggaaataaaaaatattttctaggattaatggcatgacatgaaaaaatattattattaattcaacagtcaagtcataattgagatatttcacaatccgacttctccgacttcttctttcttttctctttctgttcttcctctatcagctgcttataccactggctcattttgcaaataaacattatgtcctatactcacccactgccacaattaaaagattatgatgtctctccaaagaccggattcttaccagaaacacttcctgtggctagattaccagcatattacgatatatgggaaaatacagtcaatgtgttacctgcattattattaactaaaagaattagatcagttattgataaatttgaatgtcttgacttatcacatttacaatcagaggaacaatatcgtagagcttattcagttttaggttttttagcatcatgccttatatatggggtgttgatactccaactaataaactaccaaagcaaatcgcagatccttgggttgaagtatctgaaaaattaagaataccacctattgcaacatatgcaggtttatgtctatggaattggaaagaaattttaccattcgacgaagcaactttaaatgatgatgattcattcttagataatttacaaactataaatacttatacaggatcaattgatgaatcttggttctatctggtaagtgtctattttgaatatagatgtgctccatgtataaagttaggtttagatgcaattcaatatgcaagagataataatgttgctaaggttactgaatgtttaaaacaactagcggaaagtattgattatttaggtagtgttttaatgaaaatggaagaaatgtgtgatcctcatgttttctattttagacttcagaccatatttagctggatggaagaatatgagtagtgccggattacctgatggtgtatattatggtgatgaaacggaaccaagaatattaagtgggggatcaaatgcacaatcatcatcaattcaaacagttagatttaattttaaatgttgatcataatgcaactggggaatcggaagaaaataaaggttctgataatccatttatggctgaaatgagaaaatatatgccaggtaaacattccgatttcttagaacatttagccaaagttaatgttatccgtgattttgttatgaaaaataaatcaaagcataatgaattagtattagcatatgatgcaagctgttgcaatgcttaaatcttttagagataaacatattagaattgttactcgttatattgtcattcaatctcgtaaggaaaataatatgggttctgataatttacaaaaaaatacattaagagctggtttagcaggttcaaatcaatcaaaggataatgtattgagaggtactggtggtaccgctttattaccattcttaaaacaatgtagagatgaaacaggtaataccgctgctggtaactggggtaaaagaattttatccgttaaggaaataccaaccgaaccatcaacccaatctcaacaagtatcctcaccaacattacaaactaaagaatcagttttgtatgaatataataagaaacaatctgcaaaatcagattaaattttgagagacgttcctctttcctttgttgtttaattatactctttttcaactttttaacctgtattatatatcgtattcattaacacttttatttctttttctacttcttattacgaatttttttattactatgtcatattaatattatacaaattataagaaatttatatcgtaagtgattataaaattgttcattaaatgtttttgatcatcggtaatcctgaatatgaaccttggattttcatttttttaaaattttttaaaattatttgattatttactggtttattaatttttcttcatttatttggtcactgaaatcgttcttaaaacttgatatcaccaagtctgtcatacaaccccctgtttctcacacaaccatcaaaggttttaaaattttcagtaagttttctacttaatgaaattctttcttgtaataattgttttgaagttgtgatatccttagactctatccattgaatggtcttttcaatgaattgtttttctaagtcttttctttcagcgattgactttttaataatttcttcatcatttatagctaatccattatctttcttagttggtaataaatattcatatttataatcatcttgaccacctaattctttaagtatttgatctgcatcaatatatttttctaaatctttagtatttttagtaaaattgattttagatgcaacgactggatctaaccaatttttaacaatttgccaaataccattgaaaatccatggtgcattatgaatcaataaaatacctaaagattcaggataatgagcttcgaatgctttaatcatatatttaacaggttcataatccatatttgacattgtaaaaccagttaaatcaaaaattaatgtacattgatcaataggttcatttaacatcagtcttgcatattcaataagaagtaatgtgaaaatttcaatttcttcaaatgtttgttcagaactatgatgatatcttggtctaacaataacgattggtctgttctttttatctctaccacgaataatacatttacctgatttaaattgcttgatgacaccttcttgctttttgtctaaacatgctaattcaccatttctaacaacttcatcaactttactttcctttacacgccattcaattgagtgtgataacattagtaatgtattatcaatatcccattttcttgcacgtacaaatcttaataagaaattatctggtgaatcttgacgtaatgcatcccaaaaagctctctctgcattaattgtatctaatgagcgcaaagcttcatgaactttaatatctgttgaatgttttacatttggatcaattgcagattgattggataatgttctgctcaattcttgatgatccttttcctttgaatgtttattacgctttaatttactgaataaaccacctttcttttctttttccttttccttttcatgtgagacagtacttgatcttgattttgaactacttacaagaggtcctggaggttgaattttatatcctgtgaaatgtaaaatatacatccatacttgtttaagaacatgttcttgatcatcagttaaagtttcaactctaccacgaggtaattccatagtcattgtgtatagttttggaagaagcaagacaccaaaggaagaaataaaagaagtttccaacaaaaaaaagtaaaataataattattgtttaaatcaaattcttttaaaatgaaaatcatgttgggtgcatctcattaaatggtgttttttcgttccgctcctcaagacctttcgcccaaagcagtacagaacagtgaaaattgaaaatttattatgtaaggtgccgctctttaacatgaatttttatacagaatatattctatacagtgtatttatctatatattacccgattaggaagtattatatgttgggaacagcgtctggactgcacactgatgctgctgcccatttctgtgcttcttgaatactcttaccatccactgaaagtcctttagaaagtaaatatcctgctagtgtatcacccgcacctgttacgttaacaatatcagattcgtttactttaaaggcaggataatgtgcaattgaaaggaaaagtccgtgtctactaccagtgtttacaatatggaaatcacttccattaaaagatacagttttcggttccttggtttcaatttgtagaactaaaactccatttgatccatccttaatgactaaacgtgggaaatatggtaaaagttggaatgcttgttggaaaacacccttttgaaggtatttttctaataaaggaaattttctagaagccataacaagtctttctcttagttgactattaattcctaatgcatctaaaacagtgaaccatccatcgatatcctcaaatttcccattttttgcaagagaagcgtgtattatggctaattcctcaattgttggagttaatagttcaacaggagtttgtggaaaaacagctaaattacataatccgagttttgaacatttaacaccagatgttggttcaaccataattttaatatcaagttccatagctttaaggaaaacatcatctgctagctcagatgaaatattcatgtctaatagtatgtatttaggtttatgttcttcaatctttttgagcacgctatttgatggaatatttgtaataatatccatatctgcacacgcaactactaaattaccattagtatcatgcattgaaatatattgtgctgtattttcattggagatattaattaatccttcagatgacatgttgaattctttcattttggacaatataagtttaccagatacatcatttttattaatggccgttattaacataatagagctatctgcatttgaacgacttgctgctaatgcagtgttgaatccaacaccaccaattttactgtccataatcttgccgggattcgaatcattcattaaaggtgggttattgataatacggcacattgtatcaactgcaacagagccgacaactattgtttcggcaagttttaggctttgattcgatcaaaggttttgtattattaatttcagttttttcttctaaattggaaggttgaaatatagatggtgcatcactcttcaaatttgacaactcagctgcaattttagatcccaaaattgcattattcttaacgaattctacattaaccttagcactcttaccattagtcttttcatataaagtttgcaacaaaaatggtgttaattctttacctgtaacattatattgttcagctaattgtaatgcttcatcaataatttcatccattatggttttatctaaagcaacctctattggcgctggagcacagaagacataaccattttccatttccattctatatttcccattataaatcatatcagctgcaattcttggattttcccaaacaaatggacttcttacacctgaatctctaacataaaatcctggaacattatatttctgtaaatcccaaaactttccaatttcatttaaacttcttgcatcactatttgattctctttgaatattttcgattctctgtaagacatacggatcaattttacttctcatcgcttcatcaacgtatgtcgaaacaggcacaccttttgtctctaaatattccatcgtacgttgtatatctaaaatacttttaggacctgaacaaacaacagcaactggagtttttcccaattcatcaagatcggcacttacgtcagatagtgtccatggtctactaacaccacccaatccaccagttgaaaacacatcaattccagcaatatttgctaacatcatagttgatgcaattgtagttcctcctgtaagtttacgtgccataacattgggtatatcacgtctagatattttcacattgtgaatgtccggtaatcctaatatttcaagatgttctgagtttacaccaactgttggcatacctttaacaaatgcaattgtagctggaacacatccattatctcttattaaagattctacggtctttgccataccaatattttcaggatatggaagaccgtgtgtgatgattgttgattctaatgcaactactggaatattggagttgattgcatgtttaacttcttccgatatgttaatcctatgagctatttttgaaataaaacgggcttgtatcccatgtgatattagggacctattcagtttttgtgctgtatttagcatatatgttgttctatgatgcgattattatttaggatgaaaagagatcaagatgataatggtcttctcatagtaaaaatattttttaacaaatgtcgatgccaacatcagcagaaatattttataaaaaatgttactggtaatctatacgtttatttattcaattacgatacaaaaaaatacactaatccttcttggttgatttagttttctttgtgttggttttgggcttctttggtttaactgaattcttgaaaactcttgcaagaaatttaattatcaatttgatagtatcaataaaaattactgatagcacaagaatcacacaagaagctatcaccaaagcattatcttttataaactgttcattttcaaatgctgaatgaaactcttcgttttcaccatatctgagacctggtaagtgtttgtcaactttcttttcctttttctctaaccatgtgtcatcttcaactaaaccatcagttgatggtttctctttacctagatctttagcccattgattatccttcaattcatccaagattcttctttctcttgattcgtgtctctcaatttcgtagtatctactcttatcgaaaactgtgatatctgggaaaatgtatctattactatttttggctttatctctcaattcaacacttaacacagttggatcatcaggtaaatcattgtataatatcacctcctctacgtttgaaatctccttagtgtcgtattcttctgaattcatacttcctataagcactgtaactttaggtgtgggaaatttcatgcaaacatgtctgatcaactcatctagacgttcaataaattgatctctatattggaaacctttactaccttcttcgtgtttaagattgagaaaattgggtatatttatattaactaaagttttttgagtatgtataactaatggcatttcctcataatccattgtatttaattgatatttagagacatgacattcttcatctaacactttttctagatgtccccagtcgataactgaatgagaatctctagatccatgcattgcaacacctctagaatccaatatatgtggcatactcaaaaacgtacttgcatcacttaatctagctcttaggtggtgccataatgggaaacttgaaaagtctttaacagtcaatcctgggaccttaacaaaaatataatgttcacttgagcattgttctaaagctcttgtaaggtataaatcagtttctttctctgtaaatggaagttgttcggtatgtttcaatgatggtttcaagcctggaattaaattatatgacatgaaaagtgctggggatgtgttcacttttgccccaaacgttgtgcataaatgaatgagtattagtattaggtatgtcaactgcattgtttgattatattgtctctttgaacaacctaaacacttaaagagtgacgtgtagctcggaaggaattgaatattagcactaaaatttggatcactgagggggatttttatatagagggttcccaccttacacgcaaagaataattcaagttataaataaaattatttaatggacacgtttattaactaagtttttcttgaaattaattgtcaacaccatcaacaaagatagaatcttcaattgaattaaaatgttcgaaatatgattcaaataaagaaactaatttttcaatatctgcagaaccacaagtttctctaattgagtgcatactcaattgaggattacctaaatctaatgttctaagaccaagtttggcactgatcattggaccaatagttgaaccacatggagaatcattacgaacaacgaaaagttgaagaggaacacgtgaaaggttaccgattttctttaataaaacaataccagcagaatttgtaacatatctttggtttgcgttaactttaataactggaccatcattaaggtgtggtttgttatatgcttcatggatttctgaataatttggattaacaccgtgagccatatcagatgaaatcataaaagatttagccatagtggttaaaagataagagtttggtaattcactctttaaatcaacttctgggtttgcagttaatttagttaatctttcaataatgtttggaagaaatgatgaatcagcaccttgagcagataaagaaccaatttcttcgtggtcgaataatgaaattaattggatacctgaatttttagataatttatcatcagttgaagctttaacaattgcatcggttgcacagtaacaggtaacttgattatcaagtcttggggagaaaataaattcattgtttaatccacccaaacatgaaggttgtgtatcatataaaactaattcaaaatcttcaatttgtgaaggttcaatagataattcttttgcaattaaatctattaactctttattatgtctttcaactgatgatttaacagattcaaattgttcatcacttaaatcatcacctttacaacaaccagatgattcatttgttgcagtagtttcatttttatcatttttaactatacctgcaattggtttaaattgagattccttgttaaattcaaatttagtatatctatcctttgttaaatgaattgctaatgttggaatacgtaataaaggtttatcaattttaactaatttagcaacacatttaccagattctggataattaacgaaaactctacctgcaatacttaaatctctatcaaaccaagtatgccagataccaccaccataagtttcaacacctatttgatgataaccttcctttgattgttttgaaattggtttaattcttaaaactggtgaatcggtatgaccaccaaccattgaaaatccattacctggtacataattaccaccaactgcaaatgcaataattgaacttgcattacgtgtgacaaaatatttagaattctttttaattaatcctgcccagttatcacgttctgataattctgtaaatccgttatctttaagcttagatttaaccgaatgaacaacatgataaggagttggtgattgattgacaaagtctaaaaatccttgagcttgtttcaatgcagatgatgacatgataatagattgtttagatactatattcttagttatcatcaaagttagaaatgaatgaagccatgtaaaaaagatattaacattatcataaagaaaaattacacagtgaagggcgtccgtagtatcaaaagttgatgccgcagagggctaatataccgtggaaagaagttatttgctttatttaagcatattatcactgtaatttctttaagaaaatatgtacaaactactttaatgactaccagaagttgagtttatattatatattaacaaagatacacaatcgtagagttatgattaagaaaagatattacaaagaatctaatctatcattgatttcttgtggagttaatttacggaaacgaggacctgagacaccttcagcaccttgaaatcccagcatatcatcattagtattaccaataattgatatttcaacattatcaccattcatatcaccttcaattgattccttcaacgttagtaatgcaatatgtatagcatcttctaactctaattcatcattccatctcttctctaagaaagtctttgcagaatttgaacctttaccaattgcagttgccttccatgggaaataagaacctgatggatcaacttgataaagcataaatccactattttcatcataaccaccaactaataaagatacaccataaggtctaacacctgcactttgagtagcttcttgcataagttctgcaacatgtgaaaccataattttagttggtggatattcattataaattcttttatattttgtatgtgaaacttttcttgatttatccatcaaaattctaaaatctggtcccattcctgaatatgtcattccaatatcaggtgtaatttgtgaaattttctctataaagtctgaattgactaatattgatgtgtttttcctttcagttgctaaaacaataccattagttgccttaatacctaatgatgtaacaccttgattaacagctgcaagggcatgttcgatttgctttaattttcctgaaggagagaaagtcgtaagagaaaaagagtatctatcagccattgtgatgtatctatttgtctaatgtctatttaatcaaatatgatcaaaatgcagagagatccaatggagggcaaagtactataataatttaagcagtgatggaaacagcgacagagactcttagtgaaatttaaatttttggtttccatataaattttttttcacttcttctatatactggagagaagacaagatctgttggtgtagtatagtctaatagagatagacaaagatagataatggggactcagtctagtaagggcaacaaaaatgggaaggatcccagaaaggagaaaaaatccaagtctaataagaataaagtcaaaacaagtaatatgactaaatctaattctggttcaaattcaagaaagaacagtttacaaatgggacccaattctgttattgttcctcagaaaaagagtaaaaaggctaaagcaaaggataaggcaaaggataaagcacgtaataagaagtcaaaagctgataaagataatggtataataactaaaaaggaaaatacatattcaaaacttaatgaaattaacagtagtgatagtgttgaaaacaataacaatgataataatggggatgattctgatgatgatgaaattgtagtggtctctgaagcatctgattctgatgatgatgtgatagagactggaaataacgaagctaccaatggtgataaagatattgtattgttggattctgatagtggtgatgaaagtgaagtgattgatcctgaaaatatttcagcctcagattcctccgactctgaatctaaatctgatgatgaagctgaagatatggaagataattcaggatcaaaagaaaccgaaaaggatacaatgggaaatgattttatagagtttaacttttcagatgatgatgatgaattaaaagaagatgaggatccagtacatacaattaatagtgatgacagttatgatgatgaaaatgagtatttaagtaatgatgaaggaagttatcactctaaaagtacaaaacacaaaccgggaactgttaatgatgaattcccatggatcaggaatagtgatcattcaaaggaaagagaaattagtgattggttaactcatgaaattaaggatttcgttaaatatatatcaccatcagttgaggaaattaatgctagaaacaaccttattaagaatttaagaagtcatatttcatctatatggccagatgccgaattacattgttttggatcatttgctacagatttatacttaccaggatcggatattgattgtgtcgttgtttctccaagaggtagatatgataataaaagttcattatatcaacttacatcatatattagaaatcatggtttgggtattgaagtgacaccaattgcaaaggctaaagttccaattattaaatttgttgatccaaaaacaagaattcatatcgatatatcgtttgaaaggaaaaatggtttaactgctgctaaattgatcattgattggttgaataagactccagggttacgtgaattagttctggttgttaaacaatttttatcagtaagaaaattaaatgaagttcatgttggtggattgggaggattttcaatcatttgtttatgttattcattccttaaacttcatccaagattatctactaataacattgatcctttagagaatttaggttgtttattaattgaattttttgaattatatggatataattttggatatgatgacgttgccattgcgtttacatcacaaatggaaccaatttacataaataaaaattcaaatccagaattgattggaagaaatccatttcttttagcaattcaagatcctcatgattcttcaaacaatatttcacgtggttcatttaatctgagagatattaaacgtgctttcggtggtgcttttgaacttttagttaatagatgttatgaattaaattatgcaacttataaacaacgtttgggacaatcgattttaggtggtataattaaagtacaagggtaaacaaagagattttgttcgatgcaagaggacatgttcaaaatgttgcatttcatgccgctagtggagccaacaatcaaactaataaaaaaaacaataatagtaataaacctatagttaagaaaactggtactataatgcctccattaccatctgagaaagcagggcttgatcccgatgaatactatatgtctgattcattctattcagaggatgattcagaagatgatgcaaatagatttatacagtcacaaaaatcagataaaaatagtggaaataaaaattcaaagaaagataaaaatcaagtctccaacagtaagaaaacttcagaaattctgtctactacctgatagtggagatgatgaatacacacctgaaccaataacggggactatcccagctaaggaaccagatttctccgattcagaagatgaaagagacgaaaacaaaaatatcaatactaatcctgttgccaaaaaatcagcatttgcagtgaataaaacagacaaacgtttgtacttgggaacaaaagaatggccaaacattttaatcataggagaataactgtatataaggtatcgtatcatatcatatcgtatcattaaccagcatgtacaataataattgtgtagtatcgatgtattttaactagtaataaaccgtgagattacgtaaagcagtggctgagaaaactgaatttttgtggtgttgttttcaacttcaggatggttgtcttttcctgtagggggtatactctattgtgaaggaaaacaactaaagataacaaggaaatatgcctggtattggactatcaccgactgctatttttgaagaaacgcttgttggacttgctacttatgattttagcggaatcaatggttcagaattttgggatttcgttgcatcccataatagtcaaagtgatggtaaaccgttattattggatcaattcaccaaaactgttatatggttatggttattagaaaacaaagattttcaagtttggaagattgatgattctgaagctgaaaataataataaaacgaaaagtaaggttaagaaaacaaaatctaacggtaaagatgatgataaaagttataatttggtgtctgttgataaatcagcactccctccatttgatgatttctttgacaattcattttgtagttcatacattttaaaaatgagtgaagattatcaatcgctatatttggctagttgctcatttaaaaataacattttaggtaaaaagccatatgaattgattagaattatagctaaatataaggaaaagggtatcaattcgattgatttgatcaaagaatctggtcaagattcacgttctttaacaactagattgaacttacttgaaaaaaatatgttaattactaaagttgcagtttgtgttcaaaaatcaaactctaatcatatgacacatttcagattctcaaagaaaaattcattaaatcctgatagtggtgaaccacacattccaaatgaaaattattatgaccaatatgcagctatggcatatgtgggtgctgcacttgaagctgcagaaaacaaaattagattaaccaaagatttatatgttgaagttaaaaagactcaaccaatcatgaaagttcgtgctttcaatagaattattagaatattagtcaaaattggtcttgttgagttaattcaggttgagcataaagaaatgaaaagattttttgctgcagttcgattggttgagacattcccagatgttaataaactgcctactttaatggaatctttaaaagatagtggatttggctctaagaaggatgatgcagatataacaaacggtttagaaggtaatgaagaggaagaagaagaaactagtaattgtaaattcaacagatttttaccacttaccaatcaaatatatgatatgattaagctgaatccgggtatggcaattgcaaatttagatgatgaattaacaggttcatatcatgttaaacaaattgcaagtattcttgaaaatatttctattaccaaacctgatccttctgatccagatgcaatagtcgctcagatttttcattctggtaaaatgaaatacaacagatttacaactcaagattatttaaataaaaatgatcctagttataaacctattgggtcgatagaagaaatagaaacagttgaagcttcacctagatcactttttgaagaacatatgttgtatggaagttcatctacagacagaagaaaagtaagatatgcttctctttatgataatagaacacaaagcaatagagtctttatggttcctaaagggtatagcggtaagtgtggtacctcggcaattgaaagcgttcctatcactcctttctttaggggtacttataaatcatcaaatgaatggatttcgttaaatgttagtaagggtaaacttacagctgttaagaaagatttagcagcatacaaaagtttccatgatgcaaagattgaaaatatcaataagtttaatgaagaaataataacctctcgatcaaatgaggaagtattcaataataatattgatgttggttctgatgaaactgatgccaatttctttttacaatttcaatctaacaatattacaaatgaacaacctttggataatactgaaaaggataaaacgtttgacagtaattttgataatggtataattgaaaatacaactattagttcggaaccaccatcatcaagaagaggtaaatttgatttctcgacattagactatggtcctgagttcagaagaaaaaaactatctgaagttattgatgaagataaatgtgtttgtttgaataccacgttctgtgatagattatctaaaatcttaaaattagaatacacgattgcacgtcgtacaatggtgaatgatgcggaagcactagaatccaaaaacttaattgaaattgaacgtgtagaaggaggtagaattgttgctaaatctgtgaaaaatccgccaacagaggaagaagtaagtaaatgtcttgtaggtgattataaggtcaaatttaggaaatttacaagtactgttcaacttgataatattaccatcaataacaaagattcgctaacgagaggttggaaattccctaataaggaagctagattacaacatgctatcaataaattgaaagaatctacagagaatgcaggtaagagaaaacgtacaagtagaaaggcaagaattcttggaatcgatgagaaagatgatgaaaatggtgttgatggagaaggtagtgacaatgatagtgaatttaataaaacgaatccacttgatgatgataatgctgatgatgatggtgatgttgaaatggatgaaggtgaaggcgatgaaacacatgacgatgatactacagatgtttttgaaccattaatggatgatagaaaacgtaagaaacacaaaatttcaagtaaatcatattcacgtgttgccaaggcatttaagaagatcagagtttctattcaaattactaatgagcatattctattgttaattaaagctgcgatcattacccaatccttagctttaagtggtaatatattctggcctaaagtttcattggttttagaagatcaatattcagctgacttgttgaaaagacaatggccaaaatataagaaaatgttaggatctagaaatcttttagttgctaaaaagaattgggaaaatgttttgattgatgcagttaaaaatagattagttagttctgaagaattaataaattatgatatattcaaaatgttagacttatggaagagtgttggagctgatattttcttaaacaattcacaaaatgatgctgctaaaacatatgaagaaaatttccaaggacgagtattcaagcctttaaagaaggaaacaggatttgatgtttatagagaaacgatttcaatgattgaaaaggaagaattatggactaatagaaattttatgtattctaacgatgaagatacagaacaagctaaggttattaaagaatgtgatgagccaacatcattacaaattgccaagaccaaattaaaggcattttttgctacaaataaggagaaatttgatgcaaaatgtgtacgtgatttgtttgaagatataccaaaggaattatatgctgaagcattaactgatttggaagatcaaaaggcgattgcattcttaggtgaaggttcaaaaattaaatttacactaactgataaattatttttagcattagattgtaaattgaatgaagaatttatcagtagttcaaataaaattattgaactattagacgatgtttctagtgaagattcaaatggattattactttcaccaaaatgtccaagtggttcatatgcaccattatttgaattatttatcagtggagatattaaggttactagaattgatagaaaattggatacattaaatacatattacacaaaatcaattgatcgtagtaaatttgaatctgattttttgattagcaatttccataaagaaaataatgaagatattattgctaaaaaagttacaccaccaattgattcaccatgttcatatttatggattgatttgcgtggtgattttaatagtaaattatggaataaatgtttatttgttatactatggagtattgtttcaaatcctggtacaccacttgatattttatgttcaagaatgtatccattactagaaccatttgaagttaaaaagattgttgattggttgttagaacgtggtaatgttgttatgggacaagttgggggtttttggccaacaagatgttggtttgacgtttgaagacactttattttggtgttttttttgtattttgtatttttaaaaatagtattttagttgtatagtatagtatggtatagtataatgtaataaacagtaatgataaattaattccattacacgatagtaaaaggagatatgttgaaagcaaagtacaaatagacagatttatataattataatttatcagtttcatcaacaaatctatccttaattaattcatttaattttttatctctattgtaacatttcactcttacttccatgattttatcagctcttacatctgataatgatacggcaacaccacattctggacattcccttgatgaacgaagataaattttcaaggagtccaaaccatatgtatgggggcaatttgtatttttaacaggtctaacgaagatttctcttgaaattggacaagttaaattaactttaccaccttcaacctctaaatcatcatcatcatcatctacattaccatcgtttgttaattttgagggtaatggattttcaggatatactgatataaatataaattgctgtaaattattcgatactttagctatttccttcttaagaggtgaattattttgagatgataaattatcgaaattaaactggaaatcttcaatgagagttttctgactatttggattattttttaataattccttttcattcgatacataatcatatagattacttatatccaaggtttgtgaattttttttgaaaatagctgtcaagaataatgaataagcatcagatgatagagagtattgattgaacgcgtcacgtataccttcagtatagtcagtagatgacgcgtccttgtatataatgtttttagtttcattataggtgttttcatctataagaccagcttgaaacttttgtgctgcaatctctagttgtatactgatactttccattattgagtccttaatttcatcaagataaggttgaataaatctgtcgttataggtagttttggattgaggttgtatttgttttaacttttgcttagaagatgtagagagagggtagaactgtggcagtgataatgtcttagatatagcttcctctgagatgtgttcagcatccttttggtctgtctctgtgttcatattgggtgatatacgtatactttgtgaatcctgtaaagaaagagtttcatcaaagtggaagtattccaattgcagagattacctaataaataatataagagtgggcgggtgagaaaaaaatttttgaaatgactgcctaattttaaattggtttgagtttccagttttattgcatgttgctttcttttgggtcttttgttctctcttagaataacgcagttattgaagtcatcggagggtggctttttatggctacgtccattcaaatattgtaagattcttccactgatttagcgctgttttaggtgatgatggcaccgctatcagtgaggtaagacttttttgcattgcacgggcatcataaggatggtgatgtttaatcttttagcaaccatatttgaattatggaagtatatcaatacaagagtttattatcaattggaaatatgtctttatttaccatataagtaagatcagttggattatatggaatgaatacccaacgaaacagcgggtgattgttttagcttagatgaatagatgtggttcctaataagcaccgaatattgagcagcctcaggccaggattgggaaggtagaccagcatgaattaacatagcgcgaacatcattgaggattgttaaattgagacgttcagcaacaccgttcgcagggggggtataaccagaggtataatgtaattcaataccggaatcattaaagaatgttaatacatttttattaaaatattctgtaccttgatcacaaaagaatgattttaccaccttaccaaattgagtagatacccaatgaacatattgtttaatagcatcataaacagcatttttaccagttattggataaatcatacataaccagaagtattaaacttaaatgaaataaaatattctggtctgtcaggttgaaaaggtcttataatttgacatacatcagttgaaacagttgaaaacttaacgccatcaatatacttatcatgactttgttcaatagcatttgctcttcttgcttttgctaaatggacaagaagaacaatcgctatcggtgagcagtgatcttaaaccagggagcaacatttcaggaacagcagcaaatgttttaccgagtctagaatggatcttgcatttacatgagcaaattaaatgtgtagtgatttgatacgtatttggggataagataagaatgttggtgaagtagatggaataatgtgtgactttttgatatagaatgttctattgatagtcattaatggataaatttaggtcgttgaatgacatgttcttgacaacgattggagaccttgatacaatttgaaagttaaaattagcatctagaagatcgtactcagaaataagtgtttctgcacaatccggaacatagtaagcaacgaattttacaactttgctaccaaatttaagcaataaataaccatagcctaaagcatcatttttgtcaccatggaaatcaacagttttaaacacctcaggcacgaaaccatgcaaataatgttttaatggagttgcagtatgcatggctccactatcaataagaaggtgttcagtgcctcgcttcaatgtcatttgaattaacaattgaagcttgttattggattttaaaaccacgaattttaccaaatgatactcttgtttgattaaaacaaacttccttttttttagacaatctatctattattttaaatttataaaacaataatacatacatctgttctatatatcgtaatttaacttgtagatagtcagcttctatttgatattggattgctcacttaaagatattttacctcccaggtattttaatcagaaggctcatccatttttgctcttttctttctttgctttcacttctttcttcttctttgtatctatgttttgtcttctttttgcaccttgtatccctgtaaacctccgtgatagtctatatgactgactttgtttagatggagccaattatagaagaaattacaagagtaaaaacaagtacaaggtcaaatacattatttcaatattcaactttgaaatacatgcatacataacttgttagaacagaagttaacttataaagctttatacattggtcaagatataaaaatgttattgtgtttatcactaactctttcctgtcaaaatttggggattttctgaagcaaattatcaatatcgccttcaattctttgatcctaaaagtgtttgtggcaattttcaaatgagtttaattacttatgataaggacgattcaccaatgatgccttattggaaaccaaagtttttaaataatatgaaactcaaattatctaaattgctcaatctaaatgatagaccctttggttgtaacactgttgatgctgttttaaataaattcaaattcaagttaagtgatgatgaaacttgtaaagcttattactctaatgattttcatgtttataaattgcataaaatattgtatatgttattttaactggccagaataatcagttcccatctaaaccaaaccacctcagttgatctgaaagttttaaacagttggtcaataaaagaaagcaaaatttcaaaaatgttgcacctttattatttacaaaggccatgcatggtttcatcagtaacttggtttttcaaccaacacaaaagcacaaaagatactgcaatatctttttaaatttagattcagaaactaaatcaagatgctatcttttaaaaaaaagatagttttgtaaaattgatgtttcgactttgactaatcaattatatatagaaataaatgactgtatagtagagctataataataacaacaactaactcgccatgctatcatcccccagttgatcaaaactaattgatgcagaaagaaagaagtggtagcaaaagaaacaaaaaaagtaatgagcctcaaatttgtttacatcatcaaattttcatgattttccaatttgcaaactctttaaggtgatgattaatatactacttcctttgcaatcagtaagggagatagatataatgagtgggaaacctgctgctgcggcagctactactactgctccaactgctaataccacaaatgctactactgctactggtgctgctgctgttaatgctaataccaatgctgttaaacctcgtgcgagaccttcaaagatgccaacagcacaggaaatgcaagaactgtatgatagaattactccactgcaaaaaattgttacattacaacatatttatagtctgtatatggcagctgcacaacaaactgagaaaaaagatgttagctttaatataattcaattacagagaatgattaattcaaatcctttagttaatcctgattttgattttttagatgttgcaggttatcttaatacaaatcataataataataaaggacctgttagtcctgttcaattaattcaaattttaactgaatctttaacactgagagatgaaaggggtagaaatgaacaagttatacaacaagtacctaatacaatgttatttaaattaagtaaatttattgatttaaattttgttaaggatagattaattaaattattaaattcttataaaaatactgctttaaaggaagttgatgaattagagacgaaatggaaagctaagaaattagagataactgatattgaaaatggtaaaatggatgatagtgtattatatgaagaatttttaaaagatttgaaacgaaagagaagtactggtacttccaataaaaaattaactgataaatcgatttctccatctgtgacacctgtagagaataaagagtccgaaaaggttaatgttaaggtggatcctatagtggagaagaaagatgctgtagtggagaagaataaggagattgtgaaggaaaatgtaaaggaacatagtaaacaaataatcacggaaaatgtcaaggaaaccataaaggatattaataaggaaactaaagatgatgataataataatttacaagttagtgaagacgaaaagaaagatgtttttgtagatgcaactgaaactatatctgagatagtggaagatactgataaaataaaggagaaacaagaaaaggaatgatgaaaatattgcacataaaacacgttctgctgttaaacataaacttgaagaagaagtagagaaatctcctaaaaaaatgaaagcaagcagaaaaggaagtggttgtagaatcaaaagttgatgtcgaacctgaagagaagcctgtagttcaaaccagacctagaacaagaaggaagtagtataatagaattcagaaaaggagaaagaaaaggagacggaaaaggagaagagagacgatgaacttgatactaaagataaagacattaaagatgaagatttgaaagaaaaggacagtaaagatacaaaggaatcaggtgaagttaaagaacctatattgagtaagaaattccttcaattatcaacacaattaataactaatatttcatctcatagaattgcatcaatgtttcttcatcctgttaataaagatgaagaaccagaatattatgaaacttatcaagaaagccaattgatttgaaaaatattgtacgtatgattaagagtggtaaaataactacaattgaagaactagaattaaatatgcaaataatgtttactaatgcgattatgtataatgatacaagtgatggtgatatttatgaaagtatattagatatgatgaaagaatggaatagtttaattgacatgctgaaggagaatatttgatatagtgatatgactcttaggaactacaggatctacaaaggaatcattcaataaaattagatttgaatactattgaatcagacattggtaggtatagaagagtactagaaattaatatgtaaatttagtgtataatataactttgaaatatttcttaaacagttataaagagacaatcaacaatagatttttgattaatattatattattaatatttatatttatatatcattatgaacaagtaagtaaagatgaaatcaatccgcaaagagtttaaattatctatttatctattgtctcatttgggacattaatttttgattttgttcttggaatctagtaccaactctttcactatgttttaagaatttttctgcacatttagttaaacatgaattttctctatcagtaagtttttcagaagtgaaatcattaacacaatcattaaaacatctatcgacaagagatgtataaagtctcatgaaatcagccatttgcttttgttcaacaatcttttgaaattgttgttgttcattatagttaagttgatccattataagtgttttttgttgttatttgatgtctgatagaatgcaaacagtagtaacttgtgtataaaccagttaccaatccctaaagcattaatatatagcattaaaagttgaaatttcagtgaatttttcaaaatgtcaatttattatagtaattggtgttctgatgtttttaatgttaaggacgatgcgtcggtggcttagactgctttcccaatcgggtaatttatttttttttcactttcattacatgaatatttcattattttcaaaaattgaataattttttttttatttaatttgtgttgaaagttgtttatctgatagacaaacaaccatggcttcatacgctgaaagagcacaatcacacaactctcctgttgcaagacgtttgttttccattatggaagcaaaaaagacaaatctttgtgcttctcttgatataacaaatactgcagaacttttatcaattttagataaaattggtccttatatttgtcttgttaaaactcatattgatataatttcagatttcacatatgaaggtactattattccattaaaggaattagctaaaaaacataatttccttatttttgaagatagaaaatttgctgatattggtaatacagttaaaaatcaatataaatcaggtgttttccgtattgcttcatgggctgatattactaatgctcatggtgttactggtgcaggtatcgtatcaggtttaaaacaagcagctcaagaaacaactgatgaaccaagaggtttattaatgttagcagaattatcttcaaagggttcattagcttatggtgaatatactgaaaaaactgttgaaattgcaaaatctgataaagaatttgttattggttttattgctcaaaaagatatgggtggtaaagatgaaggttttgattggattataatgactcctggtgttggtttagatgataaaggtgatgctttaggtcaacaatatagaactgttgatgaagttattaaaactggtactgatattattattgttggtagaggtttatatggtcaaggtagagatccaattgaacaatcaattagatatcaaaaagctggttgggatgcttatttacaaaagcttaataattaataatggtatataggtatatagatcatctatctattgaaaataataaaaaaagaagtgaattatagaatttattttatgtctattaagcctctagagtaccctttaaatcttcttgtaattcaattgttagtttttgtcttgtaatttcaaagacaagtaatcctatagatgtagcaggtatactagtcaaagtatatcttgtaaaacctttatacaaaaatgaaggccatgtcataccagatttaagcttacgtgcacataatatatcaaatgtttgtttatatgaattataataaagtttaaaccatttagaagtctttattttgtttgtttcattgaaaatatctaatgcctctaatctagctaaatgaattttttgaattttactaagtggatattgaataccaatcagtgcacttgcagctgatgcacctgcaaatagtacaaatgttaattgtaaggcttttgcagatttcctattattgacatcatttggatcaatttctaatcctcttactctatcgaaccaatcaataactccctttgttgaactataacctttacttttaacaacttcaaaaactgcaaaatatgatccaaatccaaaagattctttaactaaattaagccaaaaaccagcaaatataccaactattccaatactctttaatttaccccatgcatatttatataatccttgatctttaacattactatcaactaattctgcataacttgaacgtgaatataatgcatcaattggacttgctgcaatactactaactgcacctgctataaatccagctctaaatgaatcataaaatgttaacatccatgaataccaatgttcagtacctttacccttaacaccagtatatgaccatgtccatcctctatcagttgtaaaatgttgtaataatgtaagatatgttgaatataatataactccaattgcagaatttgcaattaaaggaggtaatacttgatttggtataaattgccaacctaagcgtcgtactgattgatataaaattgcaggacttgaatgtgtgaaaatatggtagggtttaccagctaattcatttgcaaatatcattcttggaactgtcagataatcaaatcttgccggtcgaaataatttagctggggttctaatatatattgatgttaattgtaataataatgcacgtatacttgcagatgatgcagatactacctgcgtagatcgatttgagagtccgtttccggagccgtttaaattgggtattggttctgcatttgtttgagaattatctgctgaaccaaacattccttttcgttttaaataatagtatttcctctaatgtcaattggagattaggagataagataagcccagaagagagaatataataaatttcagtaatctaataaaataataatagaattgggaaaaaaatacggaacaaaactgttgaaatattttttgagatttcttgatatataataataagtttgttctttaaatatattaataggttcactatacatttacattttatacaataagacttaccttatgataaatctattcttttggttcaggttcacctgttggcttttcttgatttttagtttcttgaataacttgttcaacaactttctttaaagcactatccattttataaccctttaaagtaactaagtcaatatctgcacttctaatcattaataaattacgtagcatttcaattatttcatcttcatgaccagaatttggatagatgtttctgtttttctgtattaattgaccagttaatgcaaatattttttcaattatatttcctaatttcttaatttcatcatgatttaaaataattttacatgcaagtccaattacatcacgttgagttttgatcatacctttaacatctgtaccattaacttcaggtttcatcaattcaattaataatctcaaacatgatgcatctattattttatctaatgatagttcattaattggtatacttttattagaaattaataaattgcttaatgtatttaatgcatgatttcttaattgtctacatggattataacattgatgtgaaattgcttcaatcaatggataccatggtgaaacaacttcctgtcccttttcatttctttcattaattgattcttggaaacttttattatttaaaataacatcgcttaattcacttgtcaaagtaatagaatttaatccaatattaactaattcttgataaggattttgtttattttcaactttatgtccactatcaactaatttatcatattcatgttcccattgtgcaccatatgcaccaactgctgaaatttcatctaataatcctaaaatatccatataattgttataattaattaattttgagtgttctttaacaattttagaaataaattgaaatacataattagtattctttggtaatgatgcaatagttcttaaaataatccaatattgactatcatatataacttctttacaacaccaattatcttcattaagtattaatttctccaatggaattaaaatactaaaaccatgtttaataaatgattctcttgatgatgtagtaaatgaggtgattttattaaatgtagaatgtaataattttatattgttttcattcttaaccaatccttcattgattaaaattaatttatatgataaaattctacaaactgttgacattttcatttcactagtatcattttcaattaatgaatcacatttatttataacttgatgaataagtttttgatttttggatacaactaaataattaacaattgattctaataataataatacttcatcaacgtaatatctattggtttgatcatttttatttggtaataatgcaaccaaaatttgaactaatttattcatactatcagtatcactagtatttcttaaaacattgaggaataagttattgatattaagtgttttaacaaaatcaattgcataaatggaaatttcaatttcttcatgagttggttccaaagtttcagcagataatactttcaaataagaggaaaaagttgaaaataatccattatctttaaaaacatcagatttatttaatttatattccggttcagattttttcaaactttcaaaatttaatgatttttggaaatcaataaaaatatttggatcaattaatccaacttcaaataattttaggattgcctttattgaatagtaccaaccttttgtaactttataattatatcttttcaaaactctgaataatacaatcatgcttaattgtgcacgataatcacgaccaaataaaattgtaagatcacaaacatagattgattttaatttatcattctcatcgttaatttcaattaatggtaaaatatctctactttcatttgcaaattctgatttcttaacacctgttaaagttgataaatgtgctgtaatttcaataattgaatcaactatttcttctaatccaaaataaattgcaattgctgcacatttttcaatagttgacatcatctttgttataacactatcattagttgcatcatcaaacattacaactaatgtacttaatagatttttgtaattattttgaaataaaattttatcaaatgataataattcaccaatatcacaaccattttctgttgtccataattcatcaaatattgaattatttaattcatttgcctttttactttcttgttctgcaattaatgaatgccaaacattttcaaaccattttgctgtacctttatgttcctcaggcataataatttctttctctttgatactattgtacattttttcagtataccaaacagggaaattcttacctctataacaaccacgtaaatttctttgataatcttctaaagtcattggctttttaatatttggattgtgtaaatcagtatttaacataataagtgaaaatgataaaacaaacattgcatctgcatcaggtagaactttttcttcttcctcttcatctccatctccatttgacttgggttgttcatctgcttcatcatttgaatcttgacattggatgtatctatcattgaaagttgagataattctatcgatttgttgtgcttcaccaggtaatctaaaataatttaataaaattcttaaagattcatcaggtcttaaatttttgaaatctaataatccaacaaactcttttaataaatttaattttgtcggttttgctaataattcacctaattttttcttatcaattctaccagaattagtaaataaaaataatgcaacttctttatcatcatttggatcatttaaaaaacctttttcatgtaatgctattaaacctttttctggtttttcattccatttttgaacacttgagatgaaatctgattttttattatactgttgaattaataaattatttttggtatatgcatctaaattaacattttcaaccataccaattttaattctatcatatataccattaacaaatgacaaaacaccatctaaacaaattggtggaacatttgaagtgattaataatgaaacatctgaatatgataatctacataataatttaattaatttatttgataagtcaactctttcaagatcacaatcataagatttaaataaattaataaataaatatggtgatctacaccataaaacactcaaagcttcaattaaaaattcttttgtttgtatatttataccattttcgaattttttctttaaatcagtaatttcgtattctgttactgaattagtctcaaatttaccctttttagacatttcaaaaacagaatcattaaatttatttaattcatcattgataatattttcatctgatatgattgagtttataattgtcgttaacattaattctaattgaacttttaaatgatttggataattaattgaaaaatctaaaaatagtctcattgataaattcaccaatgcagttgattcattgttttgaattatttgaacaatatggtgacaacaattatctgcaaataatgaaaataattgtgaatgttttgtaagatgaatacctgtaacttctattattctaataaggatttctaatgataaaattcttgtactttctgtaaatctatatctattttcaggtaataagatatcaaccgtatgatttaaaaattctctcatacatggaatcccataaggagatagatcagtattatcatcattaatatttgataatggtaattcatctgaagattctgatgtttgatctataatttcgttgacatttgattcattatcttcttcttggtcatctttcttctcttcttctactgatgtttctggttctttttctatagtttcatttaatgattttttatcattactttgttcattaacatcattaagttgactatctgaaggtgttggagttgatctaccaattgtgtcaacatgtaaagattcattattaaattctagttgagcagcacttttagtattatgatcaatttcaggttttgattctaaaattttcaatttactaaataaaatttcagtaatctttaataaagaattttcagctgagcttcttaacatatctcttcttcttgtattaatagctaatgaaaaacaagttgaaacaatttcatacattgaatcatttgtaagataattatttaaatctgatgtaactaaatattctagtaattgaatgattttaactaataataagtcatcatgagtttgatctgcaccttcgaatctacaatgagctaaagttgaaactatttgagataatgcttgaactatatttgattgatctttattaactatattataattgaagaatttgtataatgaagaaacagctaagtcggtgatatagcaagaagttgaaggagatttgataacaactaggaaaggttgtaaaagagtaattatatcaattaatgagatatcattcgtttgagacaatattgagcgtaattctacaaacccagaaataaaatgatcatcatcctttgatttaaaagatttgttgttattattattagtatttaaattattaattgatttatgatgagtatttgaattattattatcttttaatctatttggaattgaacttaaattcagagattcttcatcatatgaggttgaatttgaacttgtatcatttaagaattgatttaataaaattgcagcaaatggatttgaatttgatttgttgtcctttcgcattgctgatagaataaatgttgattcttgaataacaaaagcaagtggatccattatattcattttagataatggtgaagtgtacttcaaagactccaatgtctctgtatccacagaggtcatctagttcaatctatagtatttgatttattaaaagaaatagatcagtatacttaatcaaaacaatgtcaaggaatcgatctgttaataatgcaactgaatttttgagagggcgagaattttagttaacgacagtttttcatgttgttagtagaatgctatatgttaaggtattttatgtacagagagttataaattatgtgggaatagaatagtatagtatagtaagagtaagtgtaaaagtagtatcttattaaaatgaacgagtacggtctgcattccatgtacggaatgccaaacgccattccttttgttgtaatcctggatgtaatacatcaaaattatgcttttcaagtctttccagatacattatagttggtatacctgacatataaggtaaaaagaaacattcagggaatgattttttacaattaagtaaatctttcctattattatcatttgcaatttgaattatatctgatttagcagtttcaagtttacttctagctgatattatatgatcatttgctaatgttgcaacatcaaatacaacattattaattttttctttaatttcttcaatatcagaagtatcttgataaccaccttgtaaatatcttaaacaattttcctctgataatctatatttagttaaacaatcaattggtaacattaatgattgtttcctttcagcaaaatattttaatccaataaggaatgaaccaattgatgttgcttgacctaaatgtgcacttatatcagttaaattatttcttaaattatttgaatttaaatgcggtagttctaataattcaatcccaatatctgaaaacccttttaattgaggtgataataaaattgattgtaaaagataatttatttgtgattgggtaccttcaccaaaggaacaaatttcatctaaattattaaaaccatttgatgaattattattataaaaatgttgatgactatgaaccatttgttttaacatttcaatattaaattttaaatcttttaaaattatatcagataataaaattgtacatggttcattaatatcaaggattatctgtgatgcatttgataatgataaattgttacacttatctaattgttgtaaccaaaaatgaaattttaaattattaaattcctttgatttagcagttgcaccaggttggaaaccaaatgaaattttacttaattctaaattaaaagatttaaatgcaataaatgcatctcttaaatattcgggataaagttttgaaataaataatgaagatggatctgccttttgtaattgatcaatacaatcaaatctagccttatttactttatcagtatatggatcaattgatgtgctataaaaaaccttacttgtacattttttgaaaggtgatgtagaattattgatatatctcaatgatctaagcattgttataatatattcagtatcggatctatcactatagatatatcttccacatggaaagactgaatttgatctttttattatggtgaaatttaaatatttttaattttcttagtattagcgatatttttacttagtgattattacatcattaaatttatcttacttcgtattggttgaatagattttcagatgtattatattattgcttttattgtatatatttattagtttaataataactgtggtgctgtaatagttgttatagttatttgattgtaaaaaaagtaatttcttaaaaaaaatgttattaccttgataaaataattcttattttttcaaaacacatttccaaacttaaaaaaacgtaaaattaagcaaaattaactattaaactttaaaatacaacaaaaacacaaaaacaatcgtaaatcaataaagcacgtcacgtgacacaaagtaacaaaaaccccactgctcaaacacctatgaaaaccttaaaacagcaccgtggcgcagtggaagcgcgcagggctcataaccctgatgtcgttggatcgaaaccaaccggtgctaaattttttttttttacttaatagaaaggatattacaatattgagtcataccactttatcatatttttatacctgtagtaataatataactaatacactattaatattctacaacacaataccactactacactaacaatatactataatccagtgtaactaactctactagtattagacctactaataataataatcagccataaataagccataagttgttaaaaataggaaataaatttccgaaattatttatttcctatttttatttcctatttttatttctaattccgatgtcttccctttggaacagtctattgtataacacctgttattatacctttctttgaagacttgttaattgatatcaattgagttactcaacatatcttagagtctgttaacttatcttaactcatcttatcttatcttatcttatctcaacgcaattgatttattaaagtatattgcttactattataataactattacaacgccccccttgtaaataagttttttttaaagaatttcattttaatattttaatacagatatcaattatatctacagagtatacatataatacccacatattatcctttattacatccttcaaattaaattactatcaccattagaataaattactagaatataaacaatgtctgaatatttagttaaagatgttacaagtaatacatctggaattactcgtcccatgtttgttcaagaaataactaaaattggtgaaggtgcattcggtactgtattacaagcaaatttgaaaaatgcattatctgaaccaaatagccctcaagatatatggattggtccattcgcaattaaaaaagtacctgctcaaactgaatataaatcaagagaattacaaattttaaaacaaactaatcatccaaatattgtggctttaaaatatttttataattacccaaataaagatgataataatagaatttatcaacatttagcaatggaatgtttaccttgtaatttacaaagtgaaattaaaagatattatataaataaatcaacattacctgaaaatcatattaaaattttcacatttcaaatagctagagcaatgaattatttacattcattccaaatttgtcatagagatattaaaccttcaaatattttaataaatcctgaaaatttattattaaaaatttgtgattttcggttctgcaaaagttttagaaccaaatcaaccttcagtttcttatatttgttcaagatattatagagctccagaattaattgttggttgttgtatatatacaacaaaaattgatatttgggggttaggttgtgtaatgggtgaaatgtatatgggtaaaccagttttccaaggtcaagaaccaatgttacaattaagagaaattactaaattattaggtcctccaagtgatgaatttatttatacttcaaatcctcaatataatggtccattatattctcataaaatttataattcaacaattgatgttagatttcaaaaagttttcaataatgcaaatttagatgcaatagatttattaatgaaagttttagtttattctccaattgaaagatttaatccttcacaaataatgtcacataaatattttgatgaaattaaatcagttaaatttaatgttaaatcaagattatcgaatgatccaattaaagttgatagtttattattcaattttagtgattatgaattgaaaacttttggtaaattaattaatgatatcttaccaagatcataatttaattatgattaataattaataattaataataatgaatgttatactagacttttttttactcttctatattttactttacttcactttactctaatctactttactttactttatcactctccactttatcaccatttattttttcttatataattctaattcttaatgattaatattacgacattcatatacatatccttatacttataaagctaatgaattatcttcttcaattgttgaaacaatccataaaataacacaacttaacataacacaaaaattagcaccaacattttctgtacccattttaacagttgggaaatctgtaaatcctttaattaaaaattttaaaactaaaaccaaaacactaccattaaatccaacagctaataaactaaatccaataaataaaacaattctagcttgccattgtaattgtgataaatttgaaccaaatccactacccataccattatttgaattaattaattgaactttatctaatgaattaacaacaatcataccaaatgttgaacaaataaatggtatccaatcaataaatgtaacatgaacaactgatgcattaattgttttactaaataatgatgcatcaatcattaaccatagtccaagtgaatataaaatacctgaaatatacattgtaattgattttaatgaatgttgattaacatgaaatggtaatgaaaatttaaataatcgacctccttctgacattggtttatgtatagttacttactgattatttgatctactgatatacaacaaaaaagaatggttgctaataacgtcataaaaagcctgtaataatagataataataataataatacatcgcactttaatttaatctaatttaattttctaagttctaacatcactttcaagttcctttaaccaaaatggaataaattcccaattttcaggttcaattactccattaaatgctaatgtacccgtaacaagtaataaaaatccatttaattgtaataaatgtaaactttcccatccaattatcattgaaattatccaaactaataatgtacgacaagtatcaattgttgatcttgaagttgcacttagtgaataagttaatgtaataccacaaaaattgaaaactgaaattgaaatcataatcataaatgatgtataaagtataattttattattaaacatttgattgaaagattcaattatatcaaaatatccccttccattaatcaaatatccaataatcatacctaataatgtaactaatgtaccataagtaccttcatatcctacaacttccattggttcaacatctaaatatgttaaaatatgctcctcaactacaaattgtacagctgtcattgtaatacctgaaaaaattaatatcataccaacaataatatccaatgattgtttatcatcacctaatacagacacatttctttggtcattaatatatccactaaatccaaccaagaaaacaccagagcaaacaatgaataaactaatccattcaagttttgtaattctctttttcaaaaaaataacactaaataatccaacaattaaaataactgaacctctagtcatttgataaattgaaacaggtgtataaattaatccaatattcattaatgttgtacctaataaatcacatgttgatggaatagataaaataattgaatctttccatgttggtttcttcttagttgttgtaatatcaggtaaaagtgaaactgtatcattattaataattctatttcttttcataaaataaaatggtatccaacataacatttcaccaataaacatttgtaatgtttgtaaaactggttgatcaaaatatactgaccttaatggatcattacaatgtttaacacattgcatatcttgatatttagtaaaaatggaatttaatgatccaaatactatagttcctaaaactattattaatatctatatcaaaattaatgttagtatatcttctctatatatcccaaacacatattcattcacacatactgcatatttcatcattgattccaaaagaaagaactatacatccacttatcaacttatcaactatattttttcttacacgacacgaacaaggccactgttttcgaatcctttgttgctttccttttggtacttgactaatgtcacgtattctctattactgcctcagtatttagtaaatgcaatgaattcttatatgtatctattgatgtagatataaactattaacaagaatatgacggatattatcaaaaaataaaagatttaaaacattgttttatgtgtaatgtatacatatttcagatgtaatttctaacgtaaaaactttatacttattatacaaccactttaaagtcaatttagaaaagatatatgttagatacacaagatggattgataaacattagaatgtgccttactcatttaaactctcagagccccttcattaatataatatcaactaaatccattatttaaataattatcacatatacatttcagtaaatggtttcttaccattgaatgctttatcacaatcttttgcaacacatttaatgggtgcccaaagtgatgatttacgtaaatctttctcttccactgtcatattctcataattatttaactctatcttaactttagacttttcaatacgacgttccttaacattcatacctttaaatctgacaatatttttaacacatctaccacaataaatatgtccacaattactaaaataaactttctttgataaatcaatttcaacaggtgaatatctatcattaaaattccatggtaatctgaatccttcatctatcaaatctttaatatctttttcttcagttatttcatccttaccatttttttcctcatacattcttggtataccttcgactaacgaaactccacataatacacaaacatcattatgagattcatcaccaaaatcattactatattcatttttatattgttccttaacttgtgcaattttagatcttttaattctttcagcatttgcaactttactccttgataaaattctctcttcttctctatgttcatctcttgcttgaataattctcataatatttgcaggtatttcttcattactattaatagaatttgtataattatcaaaaaatctttgtgatgaatcagtttcaagtattgtatgagcatcgaatggtccaattgtttcaagtgataacatatcattattagaattataattacttctcattgataatgcttgtaaaattctaaaatcttcagaattagaaaatgatgattgactacttgtttgatcatgtgttaatcttggtctaacatttctttcaatattaccattactattattactactatttgaatctaatgatcttcttctttgatttctcaaactaattctatcagcaactgttacgccaccaactcttcttcttgtatttgctgaaactgctgcatctcttgctcttctatttgcttcacgttgaatttgtcttaatctttcttgatttctactggcatgatgatcaattctcataaaacttgagaaatttcttaaagctgatgcatttggtggtaatggttgttgatttcctaaagtcattgaatatctaccaccacctctcctagtttcatttggtgaatcaacaggtacaaataatgatcccattggggtatataattggaaaccagaagagtttaaatttgatgttgaatcaggattatcaattgatgataaaatttcaatatcaggagctggtctttcaccaacaaattgaatatcatcattatcatcattgttatcatgagtattagtattactattttcaccatcatcatcatcatctattaaattaatttcaacatttggactattatctaaattattcggaattctttgagttctttgaagtctgtaatttctcagatttcttaaatattcattttgtgtatttcttgcatttcttaaagatctttcatcaacagataatgccattctatttctaattgaagaagttgaagtttcaattgaaccagcagttgcagtatctgaatgtgtatcacttatatcattatttaattgaatttcatttaattcaacactttgtaaatcttcaatatcattattattactatgatcaatttcttcaacttcaacaatttcttgtaaatcatcttcaatatctgaacttatcagtataggaccattgctagtttcattattattatttgtgttactattattactattattattggtatcattttgaatatgattattgggtattgaatatattattggtaatgaatccattacactcatatcaggcatttcatcaattgaaatcattggagttatttgcctttgattaggtaagtagtccccagagttattattagtactaatagattgttgattttgatcataaaattgattctgtaaccgtcgtgccagagattgtgagctattattaaaatttagcgttggagttataggatttgttcgaatatttgttgaagttatcaaaatatcatcatcattatcatcatcattatcttcatttgatataatctcattaggattattatggctaatactatgagtatcgggtagtatattgttaattccaccagattccactactctggataatcttatatttctagaagttgacatggttcataaatagttctggaagagaagtaaatggaaaagaaataaagataaacttcttgtaaagttaagataaaacagtacaattaaggtaaagtgacatgtaaattttaaaaagaaatttcaatgtattaggtaatacacattatttacgaaacttctttgagacataggttgagctattataacgattaatgataatttataatataattgttactattttgattataaaactatgtaatttgtagaaacgaacacaagaaaagagtacaagggtaagaggaaatatttttaaattaatttaaattaaaattttttgatatctgaatatgataatagttcatataaattgtttatttgtttatttattcaaacaatttataaaccacttcttttataagtaccaacaacaatacaatgatctctttcataaggttctaaagttaattgttctaaaggtttaattctttcttctctcattttttgaacttctctagcgaaaacagtttcagcatcaacagttgaatcaatacaatttgccttaattgagataacgacaccaccattatcctttaagaacatatgagaatttaatgcaataattctagcttgatcaggttgtgcaacatcggcaaagacaacatcaaccataccaattaacatacggtatttttgtggatgtcttgcatcttcaacaattgggataacatttggtctcttctttgccattgaaattaattctctaccaggtctatgagaaaattcaactgcataaactaaaccttcaggaccgacaacatcagagacatgagaaacagatgtaccagaagctgcacctaaataaagtactttagcaccaggtttaataaatatttgatctaaaccacccataataccagctgcaagttttgatctaaaaggattccaaactctatattcaacttttgtagctggaacatttggatcttttgaaggttcttcaacagaaattctcttttcaccataaactgattcaccaggtgcaatatttttagtaactaataaatcttctttacctcttgcaatgaaaacacctgcatgtctatgaggttcgatgacaactttagcaccacctttagcaccaccagctgcaccacctctaccaccacgagaaccacctctaccacctcttgcaccaccacgggaaccaccaccgaaaccacctctagatccaccacgtccaccacgggaaccacctctaccaccaccgaatccacctctagatccaccacgtccaccacgggaaccaccaaaaccacctcttgagccacctctaccgcctctttgttcgaaagccattgtctgtaagtgtatatataagtattaaagcctacgacttgttgataaaaggaaacaaaatatcaagaacaagtaaataaaatacataaaataactaaattatcagagaattagtattataataaaaaaaagcagtgaaaaaattttttttagtggaaaaaaaattaaatttttgaaaaattaaaaaaattttccacattgagaagtcgcgtctttttttccatttttcagcttatcagtagcatgaatctttgatctttgatctttgatctggggaggtgaaggtatagaactggaactgacttttcatcgagacatcgacaatgtctactcaattactactagatctcaacaagagatacactaatcaactacagaagaaacctttattgacaaaatctctcactttgatcttctttgctctattaaatgaacaattagcttctttctttgctggtgatattcaatgtcttaaattatcagataatattaacatttatcatacattaacatcaagagttccacttatgggtgtttttgctggtcttattaacgccccatttactcattatggttatcaattaattcaaaaattagttcctgctccattaactactcgtaagaaaattttacaaattttattatcaactggtattataactccaattttttgtgcctttttcgtttcttggattggtattattaataatttaaaattattattaaatcaattaaaatcaaattccgaaaatactacattaaaacttaaattgattaattttttcaaattaattggtaaaattgttaaaaattcattatttacaaattttattagagtttcatcaacttcagttataacaagtccaatatttatgttattagcacaaaaattcgtcattcccgaagcttggtctgttttctttgctttttgttatttcatcgttggtacttataataataccaaagttaaattaaaccaaaagagagcaaaagaagaagaaaagagtgaagaaaagagtgaagaaaaggataaggatactgttaaacaagaataaaatctattcatcatcatcatcattatcatcatcaccattttctccatcttttaactttcttggtggtaaaacttcttcaaatgctttcttccaatctctatatagacaccattttaataataattcaacaacatgtgcagttgttaaaactttacgtccacttaatttaatatattcatcaattggtaatcttaaaatacgtatttttttacctttatcttgacttaatttttctgctgtacctttacataaatttttatgacgtcccttatcaacaatacctccaattatataagtttcaccagcctttaattcttcaattttttcatcaacatcagcagatagataaacaacattatctaattcttcattaactttacaatcttcattaagaacagtttcaagatttgattcagttaatttagcacattcaggatcccatttggcataatctggtaaaactttatcaaatctttcctttaatcttttatctaaaccactaataaataatttacaggttggtgcaatatcgaaagttggtgcaggttcattattaccattcatacctttttcaatttcctttgaataataatttttaacagcttgtctattagttgaataagctcttgtaatttgtgaacttaaactaataacttccttttcagtcatataatcatcatatgcacaatcaattataattttaatctttgaattatcatttattggattaatttggaaaatttcaccatctttctccttttgataagttttatttaatttattcttattacgtggtttaattaaatgattaaattctttaccttcagatcttaatttttcaatctcttcacgacgttgtaaatctctattctttttcaattctttacgatgtaatctatattgagcttttgtctcttcatgtctttgtttacgtaacatcttcttatatgctgatttagtcataccttcaggtggtacaattttaccactttcatttatcttaatgtcattagtgtcattagtgacattactaacattactagcatcattgaaactattactttcactcatactgtccttaccacaataccaattccaatcccaataccaatatcaatatcaatttaataagatagaaaatttcgcagtgaaaagtttttcaaaatttcaatttctattgcttttcacagtgataagagtcggtattggggggtattatcacgatgtattatagtaatatcacagtatttatatcttagaaagtgttcatctagtagtagtgtaactacggtctttattatgttgtaaaatacccataatatctcaatataatgtactattgatccccacttatctcagaatagaacaataaagatgattattttccatgacattggaaaaagaagttttttttctttcttttctttcttttctcccatgttctttcctttgtttcttcttttaagcatcacatatatcatggcaccaccacctactcctgctatcacagcacaggctgtatcaggtatcacaggttcaatatctatagcttgttggattattgtctttgcacctcaaatatatcaaaattttacaaggaaaagtgctgaaggtttatcattcttattcgttgttttatggttattaggtgatattttcaatgttattggagctataatgcaaggtgttttaccaacaatgacagttttagcaatttattatactttagcagatttagtacttctttggcaatgcttatcttatggtcatggtattaaaaataagaatgttgatccaattcatttatcacctgctaatccactcaattctgaactggaacctttgttagaatcagtattatctaacgataatcctcatcatcaacaccatcatcaagttgatcatgattctgcaatgcaagttatagttgaagcaaataatgaatcttatacagaatctcattttaatgatataaatggttcaaaccctcacaatggttcaacacaagcatcaaattcatcaaatttatcatcttcttcatgctcttcaatatcttccatcacaacaaatcctaaatcagaattattatataatttaataatggtattattggttatgattgcaggttttggtggttggtattttggtgattcaggttcgaataatgatcctacattacctccaccatcagatgatgatcttatctttaatccattggctcaaacttttggttggttttgtgctttcctttatctaggttcaagagttccacaaattttattaaattttgaacgtaaatcatgtgatggtattgcgttcctattcttcctttttgcatgtttaggtaatataacttacgttgtttccatattggcagtttgtacggggaagaaatatcttttagttaatttatcttggttagtcggtagttgtggtaccttatttgaagattttatcatattttgtcaattcttcctttataataaagcaaaatcaattgatgataataataatgatactgatgaacaatctgtttaatgatactgttagtctttttatacataaaagtagttctataataataataatattacaatctcctatgtgttaaaggtcctctatataagcaacgcgacacgtaataaagcatcaccaaatctatatttatttcaataaacatttctatccccaatcaacaactttttttcttttacaataaacatcaacaacatgtctgctaacgtctatacggaggaatcagaaactcaaccgtcaatataccgttcatatttacgtttaccaccagttcaacaaagaacggttagagctttaattagaaatggtaataaaggttcatcttattatacagttttcgatgaagatgcaattttagcatcagaaattatttattcatcacattcagttttgaaatcatctccaatgattgctcatcctaaagatattgataggaaagtatctattcaatatttaccattatcagataaaactttttcttcattattacaaaatttaatattagataaaaattataaagttgaaatttacggtattcaagatagtaaaaatcatatttggaaattattgaaaagtggatctcctggtcatttggatgaaattgaagatataatgttttcaaatgttgatgataatgacgaagttgttctggaaaattctcaattagtttcatcatcttcaattattgcagctgttaaattaatatctaatgctaaagagggtaagaaaatgggattagcattttatgatccaaatttaaaatgtatgggattaagtgaatatttagatactgaattatattctaatactgaatctattttaatccaattaggtattaaggaatgtttaattagtttatctaataatccaactgatatcgaatttacaagattaactcaaacaattgataaatgtgatatacttataactcaagtttcctcatcaacttttagttctaataattcagatcaagatttagtttctttaactaataatgaacatattttatcaacttctgaattatcctcaatgacaacagcattagcttcatcaaatgcattaattttatatcttggattgttaggtaatgattcagttagaggtcagttaaatgtatttaaatataatcttgaaaattatatgagattagatgcagctgcagttaaggcattaaatttatttccaactggtaattctaattcaaataataacaataataatagtaatttatcatatggtccaacatcaatatttgcattattaaatcattgtaaaactgctggtggttcaagacttttagctcaatggattaaacaaccattaattgatgttaatgaaatagagaaacgtcataaattagttgaatggtttgttaataattcaacattattaggaaatattagaggtaattttttaagtaatgtacctgatatttctagattattaaaaaaattaacaaataaaaggtcaacaggattagatgacgttgttagattatatcaattagttaaaaatttagatgaatgtattgaaatacttaatgaaggattagagaatataaatgaggatgatgaagaaattagtactttagttattgaattttggattaaacaattaattgaatataaaaatatacttgataaatttaaggatatggattgaacaaacaattgatttagaatcattagcaaatgcaacatcagtttcatcaatttcttcattaattcaaattaatccacaatatgatgaaaaattattagaattaacacaaaaacgtgaagaaattgaaagtcaaatgcatcaattacatgaagatgcatcaattgatctaggtatggaaattgataaaaaattaaaattagaacaaaatgtaaatcatggttggtgttttagattaactagaaatgattcaggtgtattacgtggtaaaatcaacttcagttaagagtaaaaatgctaaaaattcacaatatcaagaattacaaacctattaaagcaggtgttttctttacaaataatgaattatctgaattatccaataaatttaatgaaataatggttgaatattcaaaacaacaaacaacaattgtaaatgaaattaaatcaattacttcaacttatataccaattttcactaaactttcaatagttttagattcacttgatgttatttcatcatttgcagttgttgcaacatgtgcaccaattgaatatacaaaaccaaaaaaaatttgggcacttaatgatgaagaaaataggaaaattagaatttggcaatcaagacatccatgtttagaagtaagtgaaggagtttcatttattccaaatgattatgtattaggaccaaaaggtgatgagaattcaattgttacaagtaatgaaggaggacaacaatggcaatcaggtaaagatttccatttaattacaggtccaaatatgggtggtaaatctacatatattagaacattaggagttatttgtttaatgaatcaaattggatcatttttaccatgtacatcagagagtgaaattgcaattgttgatgcaatccatgcaagagttggagcatctgattctcaattaaagggagtttcaacatttatggcagaaatgcttgaaatgtcatcaattatatcatcagcaaataaaggtagtttagtaattgttgatgaattgggacgtggtacaagtacatatgatggatttggacttgcatggtcaattagtgaatatttagctaaaaatattaaatcatggacattatttgcaactcatttccatgaattaacattattatcaaatgaatataataatgttggtaatttacatgttgttgcacatgttgatgaaaatgctaaaaatagtgaaattagagaatctgaggataatgttacattattatataaagttgaaccaggtattagtgatcaatcatttggtatacatgttgcagaattagttaaattcccacaaaaaatcattaatatggctaaaagaaaggccaatgaacttgaagaagaggaagaagaaaataatgaaggtactactggtgatattacagactctaataagaagatgaagtatagtaaagaggaatatgtagagggtaaacagttattgaaaaccattcttaaagagtggaaggaaaaagttgcagaggcaggtggtattgagaatattgacagtgaaaaggcagtctctattttacatgatctaacaggtggtaaatacagtgaagagataaccaagagtgctgttcttcaagagacactatctctgtaatataaaacgtgtataatatatatataccaccattaactataatattaacgtaatagaaatagaatttaagaagttaattaccacacttatcggaaaagaccgaaattgataatatttcaccaattcttcactttgattggtaattctcaatatcaacgtattttacacattgaatagagagttatgaagagaggaccgagtgtatacaagacataaattactgtatttgactttctcttgagtcacttttctcttatcttgaaattatcaaactattaatctttgacacaatattgaatcaaaaaagataaatttttttgacgtatattagattaacgtttcttattattaaaccatatcaacttattctttcattaaacatactcaatgtcttctgcaatagcatcatcaaaggttgtaattgaaggttccgttaaacctgcaactattgtatattctaaaacttcaggtaaaatcattaaagttatctcaggtgtactttcattagatgatccattattaaatcaatatgatatacaaaattatcgtgatatgagtccattcgttattatgccaggtcttgtcgatgcacatgttcacttaaatgaaccaggtcgtacagaatgggaaggttttgcatcaggtacccaatccgctgcttcaggtggtgttacaacagttattgatatgccattaaatgcaattccaccaactactaatataaaaaatttaaatattaaattgaattctgccaaaggtcaaacttgggttgatacaggattttggggtggtttagtacctgataatttaaatgatttagttccattaatcaatgcaggtgttagaggttttaaaggttttatgatggattcaggtgttgaagaattcccaatgattacaccagattatattgataaagctttacaagaagttaaggatcaacatacaatgttgatgtttcatgctgaaatggataaatctccaaaggaggaagataatgaaaaaattccatgttgtgaaaatcatcattatgatggtattacagattctcaagctgaagcattagctacatcaccaatattaaatgcagttgaaccattaactggtaaaattaatcatttaattaatcataatcatgacatagatgaacaattatcactggatgttgatttagagaaaggtgataatacaccattaaaaattgcaatggaaaataaaccaatacttgaaactgttaacccaagagcttattcatcatttttagcttcacgtcctgattcatttgaatgtaatgctatttataatattattaaatgtttgaaaaaacaaccaacaactaaagttcatattgttcatttagcaactcatgaagcattaccaatgattaaacatgcaaaggaagatttaaatttaccattaacagttgaaacttgttttcattatttatcattacgtgcagaggatatacccgatggtgcaacacaattcaaatgttgtcctccaattcgtgataataataatcgtcaattattatggaatgcattgaaaaataaattaattacatcagttgtttctgatcattctccgtgtacacctgaattaaagggtttagagagaggtgatttctttgaagcttggggtggtatctcatcagttggttttggtttacctttactatatactgttggtactaaagaattcggtattgatattactgatattgttgaatggtgttgtgtcaatactgcaaagcaagttggtctgtcacataaaaagggtaagattgaaacaggttatgatgcagattttgcaattttcaatacagaaatggaatatactgttgcaaatgctaaaactttctttaaaaataaattaactgcatttgatggtaaatcattaaagggtagagttgttgaaactatacttagaggtaattcaatttacgcattgggtaaaggtgtaagtgatgttccacttggtcaattattattagaacctagaaccgactaagtgatggtctaaaagtatgtaatttttttattaggttttactattattatttattaagattatatattttgtctattatatattttatacagagattcatttttttcaaaaagtttaattctttaaacaccatatctttgtaacacatttgaaacaccaaccatacgatcccattctggacctaaaccggacttaaatcctaccaataacattttgaaaacttcagctaattcaacacttggatgataataatttttgatcaaatctataattgcatgaatattacccaaatcatttgtaatttgtggggttttcaatataatattacacataccattaactgcactttccttttcttcattatcttctaaattttgtattaattcacaccacattataagtacttcttgagcaatttgtgatgtttgaattggataattaataccaaatctaccaattgtaattgcaacattttcaagtaatgttgtatcagcatttaaatcatgaataattggttctaaaattttgaaaaaattaactaaatattgatctaaaagatttgaatctgatctaattgcaatttcacctaatgcccaaattgcattattacatgaagcaattgaattatgatttaatttcccaatttcttgataaatgttgatcattaatggttgaataaaaggtttaataagtgaatcaaataaataaattgcgatatcaccaattaatgcatatgatgattgtctaacatcatcaaaatcatcatctaaacatgtgagaattaattccattaaagaatattgttgattggattcattacttgcaataaaagcagttgaatttgatgctaaaccttgaattaaaccatcaattaagtctaatgatgaaacaataaaatctttttcaggtggtataaatgatggatcattaagtgataatttttcttgttcaatacaattatgtaaaattctcatcgctctttgataaactggtaatgaacaattagcaaaaccttcaccaatcgatgcagccactgatgacatacattctaataatgaccataaatctttatcattatcatctaaattttgccatttttgaattaatggaggtaaaagtaaatcaagataatttggattatattttaaattttcacctaatttttcaacaaatgtttgaattgtatcataaagaacaattaaatttttcctacgataatttgcaaaataaacctggaaatgatttaataatggttcaataaaaggttcaagtaaatgagcttcagatgattgaataaaatcagctaatgatgaacaagcactttcttgaacaactttctttttatcaagtgcacaatccataattgattggaaagttggagtgaaatagtttgaaaaagcaccattttcattagcttccatacaaacccatgatgaatatctacctaatgtccaacaagttatttgtctaactcttggttgatcatcctttaatctttccacaaggaatggaacaagttcaggtaattgaggagttgcatgatttaatgcagcttcggatattgcaccaagtgttaagattgaagcttcacgaattggccattcaattgcattcatattatttttaattattgggaatgaatattcaagaacttgttcaggatatgaagttgataaaatatcaacagttgcagctgaacattttcttaaattccaagtataattgaaatcttcatcatcgttttcatcatcttcatcgtcatcatcatcatcggaatcatcatcgtcattattattatttgtgtttgtggtattttcatttaaattatccttctttagagataatttatgttcctttgacttagcaatttgaggtttaatatcttcatctttatcctctgcaccatcatcttttgaatcttctaattccatttgttcaacatcagtttcatcataaaccattttaagtaacattaaaggtataatatcctttaaatacggtagtactaattctgaaggtaattcattagttgacatagctaaaataaattctgctgcatttaatgaaacagtttcatcattatttgagctaatcatatgaatacaccaagatactataccattccaatgaacatataatttatcaggccattgttctaaaattgaaataaatattaaactaatttgtttttgaatttcttcattatctgatgaacataatgtaaaagttgtatttaatatattatctaaattagtataaattgaatttgagcctgtattggttgaataaactaaacatttcatacaatttgatctaattttaaaagataaattagtattattgattgattgaattaattgaggaattaataattgcattggtacaatggtattaccattaatttgaacttcataatctaaaattctacttgaatcttcacaaattgaagctaaagcttgagatgcaccatcaatggctaattgaccagcagcaccattaagtaaagatattaaatcttgaataagtgaaggccaaccatgattaccaacagcacggaaaattgcacttataatagttgaagtaattttccttataaatgaactttcagataaaagtccatgaggtaataattgtaaaatatgtaattgtaaagcatgatctttatatttaaaatttttcactaaatcattttttaaataaataccagcagatgcacgagttgaatcttctattgataaatcatcatttgccaaaagtatatgaagtaaataattatcaaaatctgggattttctttgcctctgaaagagcagttgttgcattttgacgtatatttgtatcacttgaaagtgtacctgcaaagatctgtacaagttgaagagtacttgacggatctggagtccaagacatgataattgattagttggagaataatagataagatgttaatgaaccactgaacgtcagatgactagccaactatactatcaactttgctttaaaataaatttaatacaatcaatttccaaattcaagtaaaaaatcatgtaaaaagcaaatcaaaatttgaaaaaaggtgaaaatctgcgtattaccgcttttcttttattacgtaagtatacatgttatttaaagctgtattctattctacgagttcgttgatgagagagtcaagttgttgcacatgggacatcactggatcaaagatactggctgtacgaggatgaagcgatagaggtgaagaagtggtagtattggtagcattagtattagtattgatattagaatttgttgatattacttgttcttcctgttccggcacaaatccttcatctagtgtaataaattcaggatacatgtctaatagatcatctaacatttgtaatgattccaacctttgaggaattgttgaagttgaagtagctggtgttaaaataggtatacttttatcactttctgatttacttatattttcattcttcaaactatcatttgatgaattaagtgttgtattttgattattacgttcacttatcattgaattattatcaaccgatccagatccaattgtactaccatcatatgtgtctaaatcttttataaacatatttctcctcttaggtacggataatggtattgatttgtttttgagtatagttttattatcatcattactattatcatcattgttatcattattatcattatcaatactatgatttatctcttgttcttcatcagatgcaaaattttcataatttcgtaatatactgaaatcatcacaatcttcatcactattaagattcatatgactattaccatcattttcattttcattctcattctcattttcactatgtgatatattcattatatcattattaacatcttcctcagcaaatgaaacacttttcttagttaagaaaggccttttaaatgaacctttcctttcaacttcaactgaatcattttcatttacaaatttattaaataattctaattcatcattttccagttcattaatattaccacgttcaagtatttcatttttccaacaatttaatctagcaagtctttcaccataagtttctaaaatttcagcaggtgcaaatccaacaattccattattatctttccttactaaccaccaataaacatcagtatcattaagtaaatgaactgcatcatctctattaagtgataaatgtgaaggatcaggacctgaaaaatcatataatgcatataatttagttggatcaatttcacgtggtggtgaacttggtctttcaattaattctattggatcatcaatcttatcattgttatcatttaaagtaatctctctttttcgtattatatcttcatcaattgtaactatattttgaagtccaataacatcaatattattttcaatttcattattattatgaaattcaggattatgtacaactgtggatgcagatgaaccagaagattcagacaatgcagataatccacctagttttttaattggacccagatctcttaaattatgtaaagtgaaatcatcaaattcatcatgttcatgaacatgatcatgatcatcatactctcctgaacctgaatctactcctgctccagagacagtatcaaaacctttattattaatttctgcagatagtcgtagcaattcttttcgtgtcattgtttgtgtagtattcattatgtgtgtgtatttctctatatatgtgtgttgttgttgttttattatttgttgtaacttcaataaatcatcaaaactctaatagctaataactctaataataaacaaaccttaatgaaaaaaaggcagtaatgatcgcttaaacctcacttcgaatcccaaataaagcacccttcccccaattttaagccacccattaatttcttggtttttttcttctgtttcatgtattttttccattttccatttctatttctatatttacatttacgtatcatttctgttttattttccatctctatttctatttctatttatactttctgcttatcagcctcattgcaattgtttaattaaatatgtcttatcaaccacctcaaggtcctcctcctggtcaaaatcaaggttattacggtaacggtagtagtgataaaggtatgttctctcaacaaccccaacaacaatattatcaacaacagcctcaacaatattatcaacaacaacctcaacaacaatattatcaacaacaacaacctgtttatgttcaacaacctcctcaacaaagtagtaataatgatagttgttgtatggcttgtttagctgctctctgtgtttgttgtaccttggatgctcttatgtaaattataatttttaatgcttataacaatacttatcttatattaatcttatatatcatatctatctatctaactatctatctaattaattaattaattaattatttataagaataatctctaatcaaattactcctccctatcaaccccaattatttcttcaatacctttacgtacagtttcaacttcacattttaaaatattaagcttttgtaaaatctttggatcaatcatcattaatgtctcttcatcatcactaatatcatgaacaatttccttaatttgttgtagaaaaatattattattgaataaaattcgacttaattcactaaattcttccttatcatatttacttaatttcttaataatttcaagatattctaaatttttacctctttgtttattacaatacctttttaaaatttcatatctacttaatatttccttgatcagctctccatgttgaattataatttgttccgctttactttgattaacgataagttcttgaaatgttttacatttaattaaaatttccttatcttcaatagtttcatctttttcacttttaccatcatataaacacaatatttttccatctttaaaaatcctaaattcaatatcaatatataaacattctttctctttcttgatagtttcaataattttatcaacttttaatccatcaactctaccttgatatctatctttagatgatttcaattcattaatctttatatccatatctttaatttgtttctcatatcgtgctatcagatcagtaacatttttttcagtatttttagcttcctcaactttctccttattatcatcctttaattgcttcatctcagtttcatgctgtaagattaattcactttctcttttaataatttcggtcttttcctctatcaatttacctatttgctcttgtaataattttttctcattatccttaccttcgatagtggttttcaaagttgcatttttattttgaagttttagtttatcagaatctaatttgtcagagtagattttgaatctattatcatattcctttatcaaatcagctttgacttgattttcaattttgtttttgagtttatcatctatttccgtatttgtatcattctcagtttcagtttcagtttcagttttagttttactatcattctcaattttagctttgaattcagtttcaaactttgttttaagtttcttctcaatttcaggtttaattttattttcaaactcaactttgagtttatctgtaatattagctctaagtttttttccaaaatcagttttaagtttctcattgaattgagccttaagcttatcctcaaattcagctttacgtttatcgttatattcagccttgagtttattctcaaattcagctctcagtccatcctcaatatcagatcctaatctggatttctcaactttggtttcaacacacattttattaacttgatcattaagcatttcatttttaatattaacttcttcattattattctttaattttaaaatctctaattttaattttttaatttcattgttgtaaacaatatcactaacactatcattataattttgattttcattaataacaattgaatcatcaaatacgaatccaaatgaaattttatttattttacaccattttttaagtattgaaattgaattttgatctaattgttttacttcataaactactaaagtggacgatttacaagttgcagcaattagtaacaagattgacacgaagagatgtaattgttcaattaaatcaattaaccctctcattttcattttactaaaactattaccaatatcatcatccataactgcatccataactttaccgataaaattaccaaaacctcttactgtatcatttttggttggttgaacccaatttttgagtaacgaaacttgtgttctggttaacaagtcacttaatgtactcatatgtgggcttaatagtaaaacatcagtttcattagttgttgtacttgatgggtctgcacataaacttttatttgaatcattttgatgacttaattgataccatttttcatatttttgtttaacattatttaaaaatctttcaacataatgtaaattacccatatcatcaagttccttgaattctttaccgtcaagataatgttcagaaaatttatttaaaaaactgaattcaaatatttttgaaattggatcattgctttcaagttctaaaaaattaagtttttcaaactataatgaacaaagatttttaaatttagaaatttgatttacagtgttagtcaatttattcacttatctattatacatcaattgctatgcaatgaaaaaagaaggtcgttattttttttgatatatttgcaatacttactaaaccaagagccagttggataaaaccaagacgaaagtcatctactaacacttcacctacaccgttgattgccattgtagataaatctgtagatgaatatgtgataacaagagaagaggaagtgaatatagcaataaaattccctttttctaatttgccttattattactttttgccttttcctttgctttctcctctgcctttctcttacgtcttctttctctctttgctgccttcattgctttctttgctgcttgcttcttagctgttgcttcatcttgtactttctttgcagctgctgcatcacattttttagcatatgcaaatatatctgatggtaactgtttcttattctcatcagatatgatttcacagaatcttttatacacatcaacttcatctaatttattattaaacacatcccaaacatcgattttgatagtatttggaatatttggagtagtgatttcagtattttcagtattttcattattttctattttttcaaaatctggcatttcttgataaaatgatttttcaatcgttggattgtatatttcttcatcaccatcatcatctgcaaattgcatccccttgattgcacgtccaactttcatcattgtttcttgattagtacaattaatgtaacatctacttaaaacactttcctcaaattgtacttccggatgatacccttgtacatagtaaatacccgtaacatctttattaaaatcaggatatgttcgagaaacttgttctataaaactttccttctttaacagaggtggtaatttacgaattgttattttgaaaactggaattgaaccttttgctaattgttcaagtttcctctcttcacgctgagcttcacgtttggcttgtctattagctgcacgtttaagtttgaatttcaatttctttctttcctttctacttaattcaccattttcagcactagtatctttactttggaccaatttggttgcatcacctttagcttcagtcggtttggatttagattttggttctcttttaggatcaaatgcttttcttacatcgattttaatgtctgctttaccatcatttttcacatcctttttaacatttttctttgattcgttattcactttaccctttggacctttcggtatgttcgatttgacaggtttagatgtggatgtagattctacattattttgttcattttttggatcttggtccttagcttgttctttctctttttctaacttttgcttctgtttttgcttttccctctgtctttgtctttgcttttgtctttgcttttgtttctgagcatttgcatctgcagatacatccttcttttcctcagacattgcgatacttatatacacttagcaatctacaagaaaagacataagactacttctacagagtgtcgttgaaaaattgcacttcgctcacatcaacatttccaatgagacgccatacagaattgacccaactctgatcatcttaataagggcaagaagatgtccatggtgtattctttggatcagttttggaatgatctatctacagttttaaccaatagaaaccaaagttatacatttactgaatttttttcattaaatattgggaaatataatccacaaagaatagctcaacttcaattatcattacaacaatttgattctaaaaaattatcaaaattaatacagaataatccaactattaaatcaatagaatggcctgcatttgaacttttcatattgaaatatttactttttgttagagacattgatccatggtcaattttaaaatctattgatttatttatttcagttttagaatgtcaatcaatgttacttaatacgaaaaataataataaatacgataaaatatctaaattattcttagacaatttcaaagaatcaatggatttggttattcaattaagtcatttaattgacactaaatcaatggaaattcataacagagagatggactttccaaggttgacatatgtctcaacaatattattaaaatcattgaataatattagatcaacagcagatttaaataccgctgaaaattatgataagattcaacttctttttgatatttcttctaatttatgtgatgtttattataagataggctcaccagtcctatgttccaatgttttctcaaatgtcaatattttaaatttgaatagaagattaattaaaaagtcaaaattattaagatttagatttataatgggtaagtactatgcacatcaatccaatttcatttcatctttccatcatttgaatgaatgtttcaaatctctttgtttatcaaaatgtccatcatctgcaattacaactatattgaaatacctcatcccagtcggtttaatacagggtaaaattgcaaatattcaattaatacgaagtcatatatctaatacaaatcattccttaaataagatacttgatatctacgaaccaatattgaagatttttaagcaaggtaatctttatggattttattcacttatttatcaacatgaaaatttttggaaatctattagattatggattccaatattacaaaaaactcgtgtattattattacgaaatttactattgaaaacatggaaattacaaaacggtacattatcatggcccatgataagactatcattgttaaatgcattacagggaatggatacattaccaattacttatcaatttacatctaatttaaataatgataatgttgatgaatacgttagaaatctagttgcagatgttgtattctctggatatattaaattgaaattcaacggacagaatttagtattgggtaaaactgatactttcccagacatgcacactacactaactgccaggtttgcaggtaatcctaaagaagcatggcttgactaactacaacttgtatacttagaaagaactgtgtaataaataacgtaaaaaaaacatcaaataaaatgacgagcctcctcgaagtgggaaaattgaaatttctttttttgtttccagttggccattaagcggtagattggctggtctggtagttggagattaattctttttttgttttgaaagggtttcctttccgtagactttgagatagcatggctgatagtattgacgtgtttgtcactctcgaagatgctgtgacacaaatctgtcagggatttgagaagattgtagagttagcacccgataggaagttatatggctcattattggaatcattggataacccatttattaaaggtttattaaaacaaaatggtaaagatattgatttgaaaagtgataatatcagatttgcagtttttttaaaagaattatatgataatggtgatctggaaatgtttaaatctttaattaacaaagattttgaaaattttgaaaaattgaagtctaagagtaaaaatgttgagaatcacgttgttgatgatactaagttgaagaacagctccagctctgataatgtagatactgtcagggatggagttgctcctgaacaaagtattctcaatgatgaaaatcaacataccaatgaaaataatgaaaaggaagatactgaaaagacgaaagagaaggaaaacgtagataatgataatatcaataatgaagagataaagaaagaagaagatgaagaagaagcaaatatgagtgaagttttcacatcatctgttgttcgtttcaatatctcagataataacaacacagatgataatatttacaaaagaaatcgtaagtttgaaattttcaaggaagataaacttccagaattacctgaagttcataataaggaattgattgcaaaggtatttacacactcttcagttttaagtaacttaaatattcctgaagaaagcaaagttaactcacacaatgaaagaattgaatttttgggtgatgcattcttacaatttattacatcaatgattatttatgaaagattcccaaccttcagtgaaggtcaattatcaattcttagaagtaaactggtttcaaatactaaattattgaagttttcacaattatatggttttgataaacaactcagaaagaactttaatgattcatctgttttgaacaataagatgtatgcagatgtctttgaagcttacttaggtgcaattgccgaggagcaaatgatggaatctatggaaggtgagaccaatgttggtgattttatgaaaggttggtttaatgcaaagaattggattgaagaattatgtgaagaagaaattagattatttgatccaagtattgttttcaaaatgcaatattctaaatcctccaaacaagatttaagattattaattggtattaataatattccagactatgttagatgtaatatcggtaatagaagattcttatcatgcgttaaaatatctcataaagtttacggttatggtattggtacaagtaataaggaagccgattcaagagctgcaactgatgcattagccaatccaggtattcgtaagatttgccctgatgatgtttggaagaagtttgaagatagtgttggacttgacagtacaggtgctttaaattttgaacaattcccaactaaagttagtaatcatgatatggaattattaaagaaggaaattgctttgaaatataagaatggtaatattaaattattggcttcaaagaataatccaatttcattattgattggtgataaggaacgtgaaattgcaaaggaagaacttgaatctaaacattcattagaaaatacatcaggtgaattgattgaagatggctccaatggtaaaaatagcaattctgcaacaagtacaccaccagtatcagcaaagaaatctaaggatacttccagtaaatactatagtaaagagtataccatgggtagaggtggtatttttgctgaagaatatggtagaattctgaagggaactgctaagagaagaggaggtattagtcgtaattgtgtttttgagattttcgaagagacacatgatggaagtaatagttcagaaataattaaacttagatgtcatgaagttctagaaaaatgtgatgaaattgatatggatagtaagaaccaattaaatgctctcttcgccaaacgtggaggtgcacctggatatattagttataaaactattagtggagatttcctatgtgaattatggtttggaaataaacaaattgttgcatatggtctggataagaataaacgtatgtcatcacaaaaggctgcaatgttagcattaaagagagaggaatactatgataatacaacttcagaggaatcaggatcagaatccggttcatcatcaggatcagaatcagaatcaaactcagactcagactcagcctcagattcaggatcagactcagactcagaatcagattgaagtgagttaattatgtaatcagatatagctcagtttatttttataagtttgtctattcatttgcaataccaacatcgtatataaacaatacaaaaataataataataataataataacaataataataatagccttaactcccctatattacacatgtcaacaagatgacataaccaatgttatttgtcagttctaaggtaataaatagacaataagaaaacaaacgcgccgctgaaaacagcaaaaggtcaacaaacgtttctaaaggaccgagtatcaattagcgcgttgtttacctttccgtattgttatttattatggttacatttgatttgttattatgaatatcaccttatgaggtctattccactctattctactctattccacttctgtgcaaattatcttgtcgaattgtttaaatattgaaggtattcccattctttcctttattttcattcttggcctcttgtacttattcctcttagtattatttatttaatttcttttgattttgtttccttcttcagtccaatcactcatttttaaataaccaaactaacacttgttgtcattcgtttcatatactccaactgtttatacattcttttaaataacaaacaacaaaattaaaatatatctaaaaatgaaattctctttatcacttttaactcttgtttcatctgctattgcagcttacgttccatctgaaccatggtcaactttaaccccagatgcagctgttccatcttgtgctgtcactgaatatacccaatcttttggtattgctattcacaccattacctctgctgttaacattaaggctaagagaggtttagcttctcaaattgaagatggtcaaattcaagttactactgcaactttccaagatactactattactgaaaaggaaaccgtctttgttcacactacaggctcttcagttattgcaaagccaggtaaccacccggatgttgttgttactcaaattactgatggtcaaattcaagctccaaacccaactgctcaagttactgaaaccgtttatgttactgttaccaagggtaagagtactactgttaccaccgttgctccaattacctcatcatcatcattccactacagatctctttcatcagtttcaacttccgctaaaccaactgcttctgattgtccagctggtccaattgcttcaaaggcaacctgtaagactgataacgatttagcaattactttagcaaatggtgtcttaaaggattctcacgatagaattggttctattgtttcaaacagacaatttcaatttgatggtccaactcctcaagctggtgcaatttatgctgctggttggggtattgaaggtggtcacttaactttaggtggtgatgatatcttctgggaatgtttatccggttcattctacaacttatacgatgaatcaattggtgaacaatgtgtccctgtttacttaaacgttatcgacttagtcgaatgttaagtgtgatgtttttaatcatccactttaatttaaatacaaaaattattttgataccaaacaaacttaaaaactttatataagtttctgcatttatcgaatgagttatatctcttcgaacttttatatttgcatttactacataactaaacaaattattaaaaaaaaattataaaattttcataaatttaccacaaacttaacatttttgttaattataaatactgttatcagttcgatctgcatcttctttctttataagttaccttctatataacttttttcttctattattgtacaatcaaacttctgacttgataatattaaaatagtgaagacatgtgtatactaaacttttaagtgtagacttgtaaaaatatttttttttgaaacttgattgacatcgtgcatgaataatcagttttccaatcgtaataaattatcaccgttttcaatctcttttttttattaacagacttcatatgattagtatgagtggaagctggaggaacttaataatagttggaacagtagctagactacttctatccaaccaattatcttatcttcaccctgatgagtttttccaatctttccagatcatctacaataacaatttaccatgggaagtactagaaaaatcaaatatcaatagatctatcttcccattattgttcacacatttcccaatgattttatttggtaagtattattcattaactccatttcaaattttggtattggtaaaatttcaattaacaattttttcatggttaattactgattggtgtttatacagattaataccgataaaacatgaacgtattaaggctacattattcacagttacttcatatttaacactggttcatcaatcacacactttttcaaactcaactgaaactcttgttttgttacctacattatacattataaatgatataagatcatatcttgagcaagtcaatacagagaaaacagagaaaacaataccctcttatagttccactaagttactagttttaggattcttaatttcttttggtacattcaatagaattacttttattgcatggattctattcccatcattctttttactcaaattcttccttaaatatccaatacgttcgtttattccaatcgtctctttcatcatttcatgttctttaattatttacattgatacattatattatgaaacatatccaacaataacaattgcaccattgaacaacttatggtacaacatgtctacatcaaatttacaacaacatggaattcattcaagaataactcatatattgataaattatccacaaatggttggtcctttaatatttttaatcttcccatttaatttctcatatactaaaacaactacatttttatcgataatttcaggctttatcattctttcaatattcccacatcaagaattacgctttttattacctgcagtaccattactttcaagtatcatcaatttttcaaatccagattctaaaattttgtcaaaatatagtaaatatgctcttacattatggattatttacacatcaatcatgtcaatattttatggattggtccatcaggcaggtattgtaccttcattgattaaactaaatgataccatattggataaatacagtgattttgaagcaaatgttaatttgattttttggagaacttatccaccacctacttggatgattgaaagtgaaaaattatcagatgttgcatatattgagagaatcgataatcttgatacaattacgattccaaaaatcgatcaaaatcgtattatcacattaaagggatctccagtttctacagttgaatctgctttcaaacaaattaaaaaaatcgaaaacaatgatgaagttttattaattgcaccaattggtgcaatgcttaatattgatagtaatctttatgaaccattatgggaatattcatggcatttagatatggatcattttgaatatgatttatacggtatagagacattcacaccaggtattggaatttataaattactattatgaatgtaattaatttgaattaactatgttctttatataaatctttaaactaataaaactatttatagaaatcaaatttatcaacttcacttcctgatttaacttgtgcggtatatgcttcttctaaatcactctgtataatcatatatctattctttcttacagctcttaaacctgcatcttgcataattgcagcaataattgcaccacttaatggatcatttctcattattaaagaatctaaatcagcttcaggagcaagagacatttttgatgcaattgtactgaaaatcattcgtctttctcttctatcttttagattagggaattcaatttttctatctaatctaccaggtcttaataatgcaggatcaattgtatcagctctattagttgccataataactttgacattagttgcttgatcgaaaccatccatttgtgttaataattcgattaaaattctttgaacttctctatctgcacctgtttgggcatcaaatcttttagttgcaattgcatcaacttcatcaatgaaaataattgatggtgcattctctcttgctaatctgaaaacatctctaaccattcttggaccttcacctaaatacttttgaacgaattcagaaccattaattctgataaatgctgcggttgaactatttgcaacagctttaactaacatagttttacctgtacctggaggtccatataaaagaacacctcttgggggatcaataccaatttgtttatatagatctgcttgaactaatggtaattcaacagcttccttaatttcttgtttttgcatatctaaaccaccaacatcattatatgtaacatctggtttttcattatcaccaacaattgaaattgatgaatcagcttcaggtggtaaaatatcaactaaagcatttgaatgacgatgtaatgcaacagatgctgctgatttcaataattctctatctaatgttgataatattctaacaacatagttagatcccgtcgttgatgatacaataccagtattttgatcaattggttcaagaaattgtccaataactaatgggactgattgaatttttttaacttcttcctgtgctctaaccagttctcttttaagatatctttgttcatctttgatatattcttcttgtaatttaattaattctaagtctttttcaagtttcttcaattttaaataaacatcattattggatgattcattagaaattccaaaatttccatttaaattcccatttgctgattttaatgtatgtttatcaatttgattatgtggttgttcacttggtggtacaattcctaattcctccatagctgtatgtatgtgatgtatagggtatctgtgatagttaaaagaaagaagccttttgccaccgacatggtgaaattcaaaaattgtggaattcgttaagaaatactcactggggcagattttcaggttgacttactgggagtgaaccctagagagctctgttactcttagttcattacattacaattcattacattatattattacatcattatatcattagccatatacattatattagtttatacagtaattccaacaagcaaacctattaatgcagataaaacactacttataatcagaccaaatttcaaatctccgacagaacttgttaccataccactattagatggagttgtaacataaaataacgagtggtgtattttcgatttgatcttttgtaaattgacaccggcccaaaatttagagtagtcataccatagatatgcagatttaagataataatttgtgtataatttgatagattcagctgaagttatttggaatggttgtaagtcagctttcttaagctggtatggtggttcataagaaacaacatcatttattattggtgatggtattattacttgtgattcattactcatatatttattatttttattatcattcttattaccatttgataacttaattccactattcagagctgttagttcatttctcaactcttgaatatcaagatcaagtttttcactattagaaaacaattctttaaccttaccttcaaatgagttaaccaatctccatcttttaaaaggctcaaacacaaattgaacaagaagaataagaactaaattgatgcacataatcaatattgtaccccaagttgagaattgtctaattttatcagaccaaatttgttcttcatgatatctattcataattgatttaatcaagttatcatgcgttgtttcttgtaatttctctaaatcatttaatcttttggatgaatctttaacacttttatctaaatcatgtgttgttaaataaattttggtaaatctctccaaatcaactggagtccaactattttttctttcaagtaactcattgacttctttttgagatgaagatctaagttctaaagatctttcatgttcagctttagctgcaagaatttccttctttagttcttttaacttattgtcatgctcatcaataacatctttcaacttgataactttattatagcctgtaatttcattaacaactttagaagcaattccaattgaacttttcagttctttaacattatgacttattgttttacttagtgtttcgtttaattctttttgagttttacgtttatttgcatagaattcactaagttcagtttgaagcaacttaacattttcactagctttcactgtatctattatttgttgaatgttgaagatatcagcataggaataagtttgtttgttatcgttgcttttgttttgattgcttttattgctcatttgttctgcatttttattttgtttactttcctccgttgagacattgtcagactcttcagagacaggtttactgttattcaacacataatcaatttcttttttctctaatctatcactttgtggtatatcttgcagtattttagataatctttgttgaacatcatcagatgaatcaactttcttcgattgatttatatcattttgttttattgtggaataaggtttaataaatatcccctttaccaattgaaggttacttttatacaatagcaaaccttctcaagtacatactgattggtataatagcaatatacacaaagttaatctcaaagtcctggtcgttttgccttgatttaccattaacaaacccgcagttgaacgactatatatttttttacactgtttctatctttaaaggctttattctaacgtgtattttaacattttctattgtactacacagtatatcactaaacatctcagcgtaatgactagtatggagtctgttcaagatggtggtataactaaaccaaaggctaaaaagctaggtaaattttcactaaaatccaaaaagaaacaaaatacatccattaaaaaaactgaaatcaacgctttgaaagatggagaagaagatagagacgatactcaaactgcagacatctccatatccaacatcgcagacattaatacatctaaagatacaacaaacacacctgttgaaccagctactaagctgatcattacaccgccaccttccaatgtctcaatcgaaggtggcgcagttcttcagccgtcagattcaaacagaggaaaaagcggctggtgcagaagatataagtgatgcagagaacagtaatatcgataacattataggagcagaaccacctaatgaggatagttacaaggaagttcctgtaaatgattttggatttgcacttttacgaggtatgggatggaatgaggatgaagagagtgtacatcgtcgtgaacagaagaagatgtacaacccctgaaatcaaggaaaacgccggatgtattattacctaatatggtcatacatacacacgacgggccgtattatcaaatttgaaaaaaaaaaagtatttttcttatcaattcaatggattaaaagatcgataattgtttatattgcaacagttggacataatggtaatatgcatgtttcttttaggaatttttcaatcaacggttgaaatatgtttaatcctaccattggtgaggttgatccctctgcattacctcgtaaaaactcaacatcatcctcaggaaaaagctctcctccattacttgatgatgatacaaagacattatccaaatcatcaaattgataatgatatccctaaagttcatttaaagacacaattgaaatcattcaatgatggtttcctgtctaggagaaagtatagtgagattatttataaatcaaaagatgatacagatgtaattaatgaaactggttatgaattaggtgatcgtacaattgaagagaacccattcgatgcaacaatttcagaaggttcaaataacaacaataatgaacatgaacatattgatgatgatgaattgtaccctaagggatggaaatctaaatttgttgttttgggtagtttcttagcatgtttcacattattcggtattatgaatgcaattggtgcaattgaatcatatgttcaaattaatcaattagcagatgattcagtctctgcagtttcttgggttttctcaatttatatgtttgtttcacttttccttggtttattagttggtcctttatatgatacttttggtgcaacttatttgttacttacaggtagtatttttacatttgttggattatttgcttgtggttcagcaactgagatttatcaatttattttaagttttggtttatgtactggtattggtactgggtttttaatgttccctgcaatctcagttatttcatgttggtttaatagaactgaaagatcattttatattggtgttgttcaaactggtggttcagttggtggtatctttttcccaatattattaagatatttatttgataaatatggatttacttgggcaatgcgtatatttgcattattcaacctaggtgttacattagttgcaacagttttaactcaagatagattaaaagaattacatgagttaacaaatgaaccttatgacgatagatcattttgggaaaaattaaagagttcaatggacttaaatgcctttaaggataaaaaatttatggacattaacagctgctttatttatgaatgaattttcacttttaattgttctaacgtatattgcatcttatgcaattgcacatggcgcaacagcttctgaaagttatttaatgattacagttttgaatatctcaggtacttttggtaaattcataccttcatattttgcacaaaaatatggttgttttaatatgatgattttaatgtcagtttcaatgtcaattgaatgtttcgttatttggttaccatttggtaaatataaaggtgcattatatacatttattgtattatttggatttgcatatgcggcaacttattcattaactggtgcaacagttggtacaatcacaactaaaacaaaagattttggtaaaagatacggatctgcttatgcaattgtttcatttggtaatttaatttcattaccaatatctggttctttcatcgttaatagaactgctcatgattatgataatatggtagcgtttgcagcatcaacatgtacattagcatccatcttattcatagtctcaagatatacagttgttggtaaaaaagttagagtagcaatttaatgtatataaacagttgtatcttcaacatttataaattaccgtataattatatatccttagaatgaacaatttcccaaactactaatcaaataaacaacatagtcaactgactataaatgaatattttttgaaaaagagaaaaatggattaaaccattataaaaactcttgttttggaaaccgagtttcagtggatgataatcaaacctctggaaaataagttattcctcacattatttccggtttttacagctatacactatactgaaagtatttcatttcaatacaatgttggccctgatgttagaataggctattccataaacattttaatcctttcgaatatgaaaagctgcttcttctatacgactattgtcgactgttatgtatcggtactgaccctggagagctttctgtgcgtcacctagagccatccttatctagttacttttattatgcttctccagcttttcattgctaacgtagatcaattctgcctgacggcgtgccttgtggcaaattctaattcttccttagtagggtattgtctttatagaccaggcctcatgggaccaagagcgagatataacacagattcctttattcaggcaatcatctcaagctgttaaaggaaagaaatcaagagggaaagcaggaggtggtgtaagggaaatgtcaaaaaaagtgggaaaagctgtctatttatacttttttcagaagttgggtgagaagagggagcattaaaagtgcgggttttgtaagtttttacggcgcacaacatgaagtaaattttattccgatttatttggtgtttatagaggtgatttattgatcaattacccaatataatgtttattccaacggattcaacaccggatgtgatagaaaagaatgacattattcatgatatctggtttgaacaatatttagcaacaattggtcgatccagtgaaagattacaaccttggacgggcaatgggcaaaataagaatttgttagaatacagtgaaggggatcacgaagatgatcatatggatgaaaatgataacattgaagaagatgataatacagatgaggaagatgatatagatgaagaatatgaggatgatgaatatgaagaggaactatcagaattgaacgaacaaagtatatcatttgttcacgaaaatgcattttcccaacctcgtaaattagagttagataaagaaatggatttcaatggatttgattccacagaattgaaagtaacttcagaatacattgaaatgatccaaagtatcagagtgccgaaacaacgaagtaaaagcaaaaacaatgataagtatgaaaatatttttttggagaaagtacaccctgatcaatttttccaaaatatcaataccaacatcaattatgttcttacaaacaacataataactaacacaaatatcaaaccgctaaatatatataggcagtatgcatatagtgatgacaaaacaacatttgatcctcttcgacatttccaattaccaataacatcaacagagagtgattttggtatagcaatgaataaggtagatgcacttagaaattttgatagaaatgaaggtttaggaaaaggtttatacactgaagctgatgactcaataattgaatcattcaatccaatgttcgcagtatataatcaaccttctagtagatatccgagagaaactacgttgaaagttgaaagtttaaccatgcgtcatacaaggtttcgtgtacatccaaacgttcatagaagtaatttatcagcaacttattttcatgatggattgaaattacttatagttgcaagggatcatattgttgaattttatgatgtttctaattatcatagtgatatagacgaaatacgtgttggagaggtacatcttgaagacacccatgattttttagaatcggatgaagattatatggcttatataattaattatctcggagttgaaactttcaaaaatgataatgatgaattaaaatattgtctggtagtagggaatgataataaagaagttatagtgttagagatggatgagttaattgcggcaattagtgatcccaactttgaaatacctaccgatgttaatcaaaggcgaaaagaaaataaagatggccttttctttcatgtttataatgaagaattgatgaatgatttcatttatcaattcaaaggttcctttattgataaatatcttcgtaccaatgattctgtttggtgtgttaaagtttgcaataatattgtttttgcttcaaataatgaaatgaaactacatgcttttcatgaaaaagatggtagaataatacatattgaatcagttaaattaaatcataatataccatatttagatgcaaaattcgatgaaaacttaaatgaaattttaatttcatgtgttacatacaaacatacactttttacctttaaatttgtcaatgatgaatttgttatgattgataatactgcacttaattcagctgcttggtcatgtttgattcttgaagatgaagattttctgaaagttcattccgttactgaattgtgtggagaatttagtaaatatgtaatcgatgttaataaaattgcaatacaaagtaggttattacatcatgaacctgaaaacgatagtttaggaattggtgctttaatgaatcacacaaatgttcaaaatttgaaattgatgaagtttttccataagaacccaattgtatctgattggacggaacaagttgcaaggaaaagaagattttatgatgaaatatacgcctctgagttgagatataaaaataatattcaggatagttattttaccaagattaagaaacagaaatatattttagcatcaaccaagtgtaatgctggattattcacatttgatcacttactcaatattagttcatgtattgatgttttccctattgttggaagaccggatattattcagaagaagtggatctgctaaatgttccgaatatgatcgtgaatttggattagaatttgatattagagatacgccatcgagaatgccatcattccttaatagaatttatcttgttgtccatatgaaatctattaatgcaatagcatatgccactcaatttggacaagttgcaatttttagactaactgattatcatggaatgaagagttttagattggagcatgtattgatagatacattaagagtgatgttaggtagacgaactatcattggtctaagtgctgcagttagtggttatgataatgttggtaatgaagaatggacattatttgttgttttaagtgactattttcaaatatcatataaaataactaagaatactgaatctgaaaaactcaatatattctccgttctatagatagaaattgcttttgaagcatagtatagtatgtattaatatttacagaaagtattacacagagaaacaaatgtgatgatttaaataatcaaaaattaactaaattatttttgagcgtctcttgcttccttttcagcagcagcctttgcaatatcttcagcagttggcataccttcattgacgattttaccaagagttaatttttgatcagccatcagttctttagtcttttcttgttcttcctttaataatttttcaccattttcctttaagtaattatacatgtgaagataatttctttgaccttgttcacgaattaaatcaagtggcattttctttgcacctcttaatgaaggtggaataccaagaagtgttgaaaatatatcatttgatttcttacgttcttgagattctttccattcttcacgcatttgatgttccttaattgcaaattcttgtgggattttagatttatcattgtatgaattaagaacatttctaacatctttagtatgagaagttgctaaatattctaaaaatgggataagttcaattaaaccattatccttttgaccttcccatttattaactggaattgcattttctggttgcattgaataacaatcttgatctggatcaataataataactttacttaaatctctattaagtaaacttaaatctttaattaatttaccatcttttgaacgacaaacttctttataaagtgaataagaaatgaatgcatgataaggatctaatttagcaacagtgttttcagcaaatgccatagatgaacgtgaaaagacaacaatttcataatattgagataaataacctaagaaataatcaagacctggtctctttgcagttttccaaccttttttataatcccaagcagaatgaacaagcatatcatctaattctaaaacaagagtgtaaggaggagcatattgacctggttgttgaggtggtaataaatcagtaaatgcaggttcagagaaaacatcagagacacctaaaattcttttctttaatcttttatagataagtgatggagacataccattttcagattcaacataaagttcaggttcttcatccttatcataatctctagccatataaccaaggaaaccaagatttgcagctaagaaactgtaccaaaagagtcttgaataaaattctttctttttatcaatagttgattttgtattattcttacgagatttagtttgttcaaattcatcttttgcaggttctttttcatttgatgaagattctttctttggtggagtgtcagtatcaacacctgcctttgcaagtaggtcatcatcaagaagtggtttttgagaatatgcccttaatgaagttaaaggtttcaaagttaagctcgaacgagaaactcttgaagctctaacagcaagtccagcaaaacgttttgcaataatggaagccatttccgatagtgttcgttagaaagaagaggtgttacaagagaagagaaaagaagagaataaaagaaatccactcattcatgaaatggacgttgtgccagtgtccgagtgaaaaattgcaggtgacatgaaaatcttaaaaaattatcaattttatagtggttgtaactgtattttacttgtatatttatcttgttttcaaaaggtatataccattgctcatacaaccaaaacatgtcggatccctttgcagcacaattatcagcattcaggaaaactttacaaccaacagacacatcaaaagctgctaaaatacaggataaaacacctgaaactgaagttgagaagaaaccagtagtgaataacagtacaaatgaattaaagaaaccatcagatgaagaaattgaacagcctgctaagagattacaactggaacgtccaactaattctagtaatagaccaaccaatgcatctaatcttacgatgagattaatgacctcatctgattatattaaatcacataatggaccagtttcagtaaatgaattagagaaagcattaaagataacagttgatgcaccattactaaaatgtttatcaaatgttgatagaattcaatatcaagatggtaaatttcaatatttatcacttcataatattaaaactggagcagatctcgtacgagttttagagaatcaaccagcatttgcaggtatatcagttaaacaattaaaggatggatggagtaaatgtatagaaactattgatgaattagagagagatcattatataatagttcatcgtacgaagaaggataattctgcaagacatgtttggttaaataaggatagattagagatgggttgtcctgcatcagttaagaaactttgggattcagtttcaatacctgcacatgatgatttagttaaattacttgtagataatggacttactccgacgaatgctgaacctgagagtatgcgtcgtaagaagattacatcagttaaggaacgtaaacaaaagaaaactcgtcgtggtaagattacaaatatccatatgaaaggtattcttaaagattattctggtaaacttaaataatagttctggatgtgtgcttgtgtatatatttacaagcaatataatatattatagtttattaaaagtatatctaattttatgtgttatatgtaaatgtgatttaaatgattattatgatgattatgatgattgtacaattagaaaagatatcattgattaattcttttctttcttttcctttttatctttcttttccttcttctccttcttatcctttttatcctttttgtctttcttttccttcttttcaggtttttcttctctatgtttcttcttttctacacgtcccttccttgatgaaatcttttctaccgtaaccagttgggaaatgacgcatttctaaatcggtttccttttcaacatcgactctatgtactctaactgcatcataattaatttctggaattttaacaaattcactaatatttaacatttttgatacatgtaaaccattatatcttaaagtatcatcatttggagttaaaatttgaaatttttcaccaacattttcaatttctgaattatatgtccttccatcaatttcaaaatcatcatcaactgaaatattatctaaagatttaatatcaacatctttgggcactttaattaaccatacttgatcctttttacctaaatttttcaaatcttttggagtatgaaatttagtttcctttgtatatttacgtggtacagtgaatgcaactgcattggattcaagttgacgttcagtgtcactgtcacttaatccatcgtcggagtctacaatgacttcctctgatatgatcttctttgccatggtactgtgttatgtgtgtttttctaccacttgaaatataagtcaaataacttccttttacctataactaacaactgaaaaaattttttttttttcccttaacaaaattcaaagtgcgggaagtgttgataaattctcagtcaggtctttggctgtttaccatcttaaaggactgtatcttcttttacaagacattctattctattgactaatcacactcaatggacactaataacccttctatcccactcaatcaacctgtacctgcagctttgaactctttacattctgcattggatctcatttttaaccctaattcatatattaatgcagattttaatgacccttcagtatcagctgcctttgcattttgttcaaaatatatgaatgatcaagatttccgcaattcattactatatttacctaaatcaacattaccaacaatgtcatttactgatccatatctatataattggccagctccttatatgtttaatttattccctccatttcttaatttaccaatagataaattatctccaaatttaataattaatggtaataatccagaaattttcttaaaatatcaatcattaggtgcttcaattttaagatatgcagttgagtccatcttattgaaaaataatcaaccattatcagaatataatatcactttaccttcattcctgaatgaacattctcttaatatactttgtcaagcttataatttagaatttaattataagtttattggtttacaaataccttcatataaattatttcttgcatttttcggtatttatcatgaaacttaccttgctaacccatcacaatcatctaatgaacattggaatctattatttgattggttggagaatttattggggtattcaaatatcaataaatcaccaattgaaaaggcagaacctaaaattcatgagccgttaccatcacaaaaacaacctatattaaaggaaaaagataccaatcatcattcagttgaaactgttcaaactggttcaggtccaattcctgatgatattaacttacaagaattaattcaatcagttcaacaagatattaatcaatcgaaaattgcaactattgatttaacatataaaattgatgaataccctgatttgaaaacaggttatttttcatgtcatttattaattgataaagttgaattctcatattcaaaggcaatgaataaaaaattagctaaatcaggttgtgcattaattgcagcaattgatcccatcatttattaaatatattcgccgttcatataatgaacattggaataaaaaatatttaaataataaattcaattataaaacaaaaactaatacttgatccaagatttatagtaaatgatattaatgaaactaatttctcatttgatcaaaatatgaatgataatgatattaataatattatcaataataatagtggatcaccaatttctaatattggatcaccaattccatcatcaataaataataatataataacatcaccaattaattcatcaatttctaatacaccaatacgaaaaccaatgattcaattatcaacatgcaaaggaaaaagtttatgcatattataattcaaaatataatattgtgcccaaatatacatttaaacaattaggtaatggtaaatttgaggcaaaattaacattaggtgataaaattacaagtattggaattggtccaagtaagaaagatgcaggtgcaattgctgctaatgaaagtaattgaagataatttagatattaatcagtaaatattgttatgaatctatatagtagtagtagtgtatatacttttttaagttttctttttcttttttttttaataatcaccttcatttaacatgttaatttcagaaggtgccttaacatcaattatatcctattgatgcagttgaatttgaacgagcatttgcagcacgtacactctcagctctttgcatatattgtgattcatcacctgtaacatattcaccagtgaaaacaccaacttcaaaacctgtaattggaggaatttcaacatctctttgaattaatgatttaattgtatcatctcttgaaacaactggtgttaaagctaattcaacttcacgatcttttaataattcatctctttgacaacattcaattaaatcatttaaattttgatagaaaacataatctgcgccaattttatttgaaatttcaatttcacttctattataaccaactaattgtttattatctgctaaatcaataccataaatatgattatatctaataacaggtgaacatgaagcaaaataaactttctttgcacctgcctctcttgccatattaacaatttcttgtgatgttgtaccacgtacaattgaatcatcaactaaaagaacagatttaccataaaattcagatgccattgcatttaattttcttctaacacttgattgtctttgcttttgatctggcataataaaagttctaccaacatatctatttttaataaaaccttctctatatggtatattaagtgaaattgcacattgtaaagctgaatgtcttgaagtatcaggtacaggtataacaacatcaatttcatctaaaacatttttatttaatgatttataataattagtaatatttgaagctaatttttcacccattaataatcttgatctatagacggatataccatcaaggactgaatcaggtcttgcaaaataaacatattcgaaaatatctggagtataagttttagctggtacaacttgtttgaaaactggttttaaatcagttttattaataataactgcttcacctggtaaaatatctctataaacttgataaccatgagctttaagtacaacagattctgaagcaatcatataatctctcataccatcatcttttaatctttcaccaattaataaaggtctaataccatttggatctctaaaacctattataccataacctgataacattgcagtacaagcataaccacctttaactttattgaaaacaccttctaaagctttaaatatatcattttcattaactcttgatttatcataagttgctaattcagctgcaaataaatttaataataattcagaatcactatcagtattaatatgacgatgaactacttcatccatatattttttcaattcatcaccatttgttaaattaccattatgacctaatgaaataccataaggtgcattaacataaaaaggttgagcttcactatttgaacttgaaccagcagttggatatcttaaatgagcaatacccatattaccaactaatttactcattctatcttgagtaaaaacatctctagccataccattacctttacattgatataatctaccaccacgaccacaagtgacaatacctgcagcatcttgacctctatgttgtaaatataatgaaccatcaaataattcacttgcaacattaacatttgaatcagaagatataatagctaatataccacacattttcttttgttatattatatgattgtgattgattatgattggatattgataaggattaaaattaaattacagaaaaaatattagagtagattaattactttaattgagataatttaatgtaatatataagaatattaagataagattattaagatagattaattacagattaaattattagagatcaaggagtttagagaaaagaagtggattaaatgaaaatgtaaaaggaataacctactgaaaagatcagaataatgaatcactaaaataaaacaagtgaaaaatttgtattgtaaattaaaattacatagtaccctattgttaaatactccgagattgagattgagattgggagaagtcagaaattttttttaatttatttttttaaaatgatagtcgcatcgacctcaaaatataatagtcgcatcgactctgtattacgtaattggatataatttgatattacgtaatctggagataacttaaaaaattctcggagataatataataatagaaaatgaccctcttttaaacaaaggcgaaggtatacgggaggagtgtcaggatattaatattattagtatattattaaataccagcctttttttttgtgatttacttggctttacttccatttccactgggcaattctctgttaatcaattagtaatgggtaatgaaggttctaaaccagtaaataaatcttcatttactcgttctgatactcaaggttcttcaaaatcttctcgttctttgaagagtagattatcaactcattcaaattctaattctaattctaattcaaattcaaattcaattcaaattcaaattcaaattcaaattcaagggataaaataaataatgatgacacaaataatactggtcataagttattagataataatagtaggcgtaattcttttcatttctaataaatcaattaaatctaataaatctaataaatcaaataaatcatcttcaaagtataatgataatactaataataataataataacaatgatgacaacataaataatcataatcatatagattataatcataaccataatcatgattcaacatctcattatgattatatttatgatacagaatataataacaatgatactaatcattctaacgataatgataccaataatacattagacaacaacaataatattaatacaatttataaacattctcgttcatattcttactcaaatattgaaaattcacaaaataataataactcaaattctaataacaatataaaactcccaccttcaatggcaatagtaaaaccaagatctccaattttaagaatgaattcatcaacttcaattaaggataattcaattcatcatagtagtaaggataattcatatacaaattctaattctaactctaattcgaactttaattcagtttcaagaagaaattcaacaaatactgttaattcatcaaatagtaaaaatagtaatagtagaagtaatagatcgagttctcatggtataccaattgaagattttaataatttacatataaatagttcaccaattacaaatccaatttcaaattcttataattcaaatataagtgataaattacttgataataatattataatagatggcaacaatgattcaaatatatcaagcgttaatcatataactaacaataatagtgtatctaatcatactagtcgtcgatcatctgtttcaagtagagttaaaaccccctttgaatcatctgatgctactaacaatagaaatgacgattatatatcttataatgattcaaatgatcaattgacaaatgatcaaatcataccaactataaatacagaggatgagaatcaatataatcaaattcaaaatactcatttgaataatgaatctccgaataatttaaatatacccaataatacttacaacattaataatgataacaatattaattacaactatcactgataacaatactataaataatgacaatttacatacagtaaatgaaaataatgttacaataaataatgaacaattaccttattcagattataggaaaagatataatattaatatagaagattttattcaaagattattagatgcaggttattctgctaagaggacaaaatctgtttgtttgaaaaattcagaaattgcaatggtttgtgcagtcgcaagagaaattttcttaagtcaaccaacattacttgaattaagtgcacctgttaaaattgttggtgatgtacatggtcaatatactgacttaattagaattttctctaaatgtggtttcccaccggcttcaaattatttatttttaggtgattatgttgatagaggtaaacaatcattagaaactattttattattattatgttataagattaaattccctgaaaatttctttcttctaagaggtaatcatgaatgtgcacaaattacaagacaatatggtttttatgatgaatgtaagagacgtacaaatttgaaaacttggaaattatttgttgatacttttaatacattaccagttgctgcattagttgttggtaaaatcttttgtgttcatggaggtttatcaccagttcttaattcaatggatgaaattagaaatattagaagaccaacagatgtccccgattttggtttgttaaatgatttattatggtcagatccagcagattcaccaaatcaatgggaagataatgaacgtggtgtttcatattgttttaataaagttgcaattaataattttttaaataaatttcaatttgatttagttgttagagctcatatggtcgttgaggatggttatgaatttttcaatgatagatcattagttacaattttttcagctccgaactactgtggagagttcgataattggggtgcagttatgggtgtaagtgaagaattattatgcttcatttgaattattagatcctttagatagtgttactttgaaaaatttgatgaaaaagggtagaattgaaagacgtaatgcaatgttaaattacaataataataacaataataatgtcaattcagttgaaaatgtatagtcattcattatacaactctatcctatataactttacttataaataaataaaataaatacttattatataaacataaatcgctttattctttctcaacaattacccaccaattatctctttcataaccgtctttcactaccttccctcctgccttaatacaattatcaattaattcaccattcttgtataaatgataaaatctcatcttaactggaggtttttcaacattagctacttctttttcttcttcttcttttatatctttctttttcttacccttttgagctaaaacccacggcaccaatatatcttgttccataccttctttataacctcttcttgatttttcttgttctaatgcccaacaataaattaatgcttgtccacctttctttaaaactcttaaaatttctttaattgcattctattcttctattttcatcagcaaaatggtgaataactgcaattgaaattgcaaattcaaatttatcattgttatgtggtaaattcaatccatctgcaacttattatatcattacatttttcacctttgtgtaatgattttgcttgatcaattaaacctgttgaataatctgatccaattataaataattttggatttatggaaatatatttaccattaccacaaccgacatcaacacctatggatttgtcctctctggtttctaaaaattctttaactattggccatggcttgtatcttgtttgtgaaaaatgttgtgcaatttcattatacacatcatgaacaaattcactttctttgattttagaattttctctggaatgaaatttctctgtttcttgttgtatctcctctatagttggctgaactgatcccgacatgtttgatattacagctggttgttaaataaaaggaaaaaaaatttatcttaaacttttggtgaaaaataattttcatttcatcacgacatgcaacaataaaatggtaaatttctattattcagtctttgattcattcatcaaaagtcaatggagagtaaaactgaacaggtatcagaggctgctccatcctaaggagaaaacaaattattttcaatggacagtaataatactactcattgggatcaccataccttatataactacaatcatttaccctattataaatttaattatcttatcaatatgcatgccacataaagattcaattttacaatttaatgaaaatccattaaaagatgttgaacttataatcccagttagatttgcatctgaattcaatttccctgatttatttgaaacaactgagattcaaattgatgcacgtacaagacaagaatttttcacattaccaatgtataaagttaaattgataaatggtagcaaggaagaatatttacagggtaagtatcctgaagatgatttatttgttaattctgtgttaagttcagagaatggattacaagttgatggtatgcgtaattatggtgaaatatatttcagtcttgatgcattggattctaatgatttcccatttttcttaactcaattaattattgatcatgcctttagagatgaattagagaaatattcaccagataattattatgtatctcaaactaatgataaaaatacatttataaatagtattggttatagtgattttccaataattaacagtttagttgattctgctgttgatgataaaccagttgttattagattaaagttttttattgctgctgcagatttgatgaatgttaatatgcaatctgcagttgaagaatatttattaccgttatttgaagagtttaaggactatatcaaatttgaaatatattttgcaaccaaacctatgaacaatccaaacccagattttgaagtggaagaaattgatgattatttcccaactgagttaactgatttagctgaattagcagatatttacaaacaaactaaaaaatacgagagaaatgaagatggttcatttgatattcattttgtattgtaccccttcttacaaggtggtgaaaagatcaagagtaaaactgttgatggtaaaccattatattcaacaatagaaaattcttatttgtcaattgatgattgggggtcaatttatttttcacatataccagatcattcaccattatacaatggtgaagttaatgatatacatgaattttccaaacaacaattaaaggattgcatgtggtcatttactgaagcccttttagatttcttacatgttccatgtgaatcactttcaacaaagatgagaattaagattttccaaagatatttaacagtacaaaatattgttagatcagcccatgatgtttattatattccaaatgcacaatcattaaggaaactaagacctgatagattcttgggactaattgagaagctagacacagtattagagttacgacaggaaactattgatttgcttaaagcagatcaaacgaaagaagcacttaaaacatctcgtaaaatgttaagtctctctctgaagagaaaggcaaaagcatagtatatgtattatatccttcattatcatctaagtgtatctattaattgtaaaacataagtataaagaaataaagcatccagtaaatcaatctgatcatggaagaaaaacatgaaatttgaaaaatttatgtcattagtaaaatatcttttcttagtggttcatttaaattcacggaatagattagttcatttatcagccaagtatacacccatctcacgcaatgtctactaactcatatgctaaaaagatagtatctgttttacaacagtttcctgctgatactgttaaacattatgcatcttttaaatatacccaaattgaacgtttctgtaatattggaggaattcaagttccaaaagaagttaaagatgagaaagcaattcaagacaagaaacaacaagttattattaaattagatccagctaaacttaaaagaatgattttttctgaaactgatgaaaagccaaattatcaaaataatttatttaatgaagatattttaaaacaacaatataaatcattgaaaaatatacatgataataaatggtcaaaatattacactatttctaataaacttatagaaccaaagggtaatcccaattattataatcgtcttttaggtgatgttactaaaggtggtcagaagaaagaaggtttatttacagcttttaaaacaattatcactggtagatattaatttcaaaccatatctctataaattctaatttacaatcatatctatctatttatcttacactgtatatataatattatcatataactcgaataataaagtaaacaaatatcactttttagcaaatgttaatgaacatttcttacccttaactaatggtattttacccaaagatttataacattccaccgcttcagattcattttgaaactcaattaatccaacatgtcttactgaaacataattagctgtaagaaatcctttatatttttcaaataattcaattaaatcactctgtgtaacttcatcactaagttcagtaataatgagtatacgatttggcactatttccttcatacgtttcttatttggtttattttcgtcattatcaacatcttcatcatcttcatgacttcttttcttgctattatccttacctgtacgtcttttaattctttcttcacgttccttagttatatattcgttaaatttatccgttccttttaataataaatcactttctttctttgcacgttggatatgcaacggttttcctaaaacatattcagtgtttaatgtatccattacttgatcaagctcaacggaatcgtcaaatacaacaaatgcttgtcctcgtaattgtatattatgacatgtttgaatattcttcactgggaacccattttcattgaatatttctcttaatgaaaactctaacttttttaatgaaaccttttcattgagattccgtatatatactgtatgtgatgccatgtttggatcctctacaaaaagaagttcattggtagatcgatggtctttaaactgacaaataatgcgccacattaaaaattcaaaattcttttattattatctacagtttacacataaatatttcatttagataaccctaattctgttaaaaatgcagtagattcaggctttctacctaataaatcaaccaagttatccatttcatcacgagatccacctcttgcaagaatcttgttacggtaatccataccattgttaacattcaatggatccttagcaaatttagagaagaaaacatcagccgcaaagacatttgaccataaataaccataataaccagatgcataaccacccattaaatgaccaaatgatccataacctttaaaatcaacaccaccgttactaattaaacagatttcttcacgcatatcattccataatttatcaacattaacattaccatcgatggaagtatgtaatgccatatcaaataaaccaaaatgtaattgtcttaaattgaacattgcaccattaacattctttgatgcaataagtgaatcaatcaattcctttggtaaagtttcaccagtttgataatgacttgataatttagttaacattgatgcatcccaacagaaatattctaataattgtgatggcatctcaacaaaatcccaactgactgatgtaccatggaatcttgaataaattgtttgtcccattaaatcatgaataccgtgacctaattcatggaaaaatgtaacaacttcaccgtgttttaataatgatggtttgtcatttgtgtctttagtaaagttacaaactaatgaggtggatgggtaattctttttaccagtagtaacatcaatataagctggaactaaaccaaagtttgctgcatgaccatatttgccggttcttggatgtaaatcaaaatataagtaaccaatgaatactggatttgctgtgtcgtccattttccaaacttggaattgtttaacatcttcatgccaagtgttatataatttatcatctttagcaatttcaataaatttcaagttaaaaatagtttcataaattgaaagcatcttagaaatagtgtttttcattgggaaatattcagcaattttaatatcatcaacattataatcattttctaacattttagtatgataatatctttgatcccaaatattataaccagtatcagaattaccagtttcttcaacctttaatgattttaaatattcaaattccttttcacctaatggtttaagtttagtctttaaatcgttcaagaaattcataacattttcaggagtttttgccattctttcttcaagaatatattcagagaaattcttataacctaaaagttgagataattctgctctaattttaacagctttaattaataattcagcattttcgggacatttattttgatcagcggtaaatgcagattttctagtttcttcatttttagcatatttaagaactgggaataaatcaggatatttgaaagtcattttatacttaacagatccatcttcctctttaacttcttcaaattgtttaataacatcttctggaacattttctaattcatcctttgtataaagtttaaaaccagtttcttcacttaaattagaagagaattttaatgataaagttgaaagttcttgttttaactctttaattttttctctagtttctaatggtaatgaaagaccatttctttcatattgtttatttaatttttcaataaatctcttagtttcagaatctaatgaattattatctttattatctaaataaactttattaataactttataaacatcttctcttaaacctgcttcaataccatactttctaaatttagcatctgattcattagatgcatctcttaaagccttatcagcagagacatattgataaaatgataattgattagttaaaccggattgtttattctctaaatcagcataaggtttaataacattatcaattgttgcatattcaattgcaattgaaccaattttattatctaaagcttcagcttcttcaataagtttagttgtctctgataaaattgtttcaggagtatgattccattgaattggagattgtggagctacgaattgagttgttgacattgaataagatctattttgaatataataagctgcagataaagtaacaataccagtggataaccaaaatttgttattgacagtagttaatggtttcaataatgatctaccaagtatatgcatacctaaagaacgaacaataatgaagatttattagtatatttgaaaagttaagtttcccttcaggattaatgctaagccctacttataataactttatgatcttacgtaataatcataattattttctctttaaaaaagcttaaattttcaccataatcacgacaccctttttgttgtaggctcaacacaacttttacacagtaatgtaaccaaacttgcgtcgaaattgctggctttccataaaatagctccaaaaaggccaataataccactaaaaaaagggagatattaagtgctttgtagagcaacatttttttgattaaacttccaattttccaaaaattaatgaaaaatatcaacaactttatcaaactatttttcaaatattataaaattagtaaacaatacaacagtacaatgcgtctaatacaacaaagagaagagatcacaataagccaaatgttcatataacccaataaaatttcaatattaatgcataatgtgtctgtatgtggtatagcctgagatatggactttgcgtcgacagtgccgtatattagtacaagccctgacagtgcgcgatggttacagcggactaataaattatagttccgatttctagatatttcaatagtttaatttgaataaaaggactgtataaagtatttattatttgtaaagatagtaaatgatagttaaagtactattgttttcatgttttatcttcgcacttcccgccttaattcacatccacagattcattataaatgcaggtatttaaactgaggtaattcctcaattatttcccaatgctgttttcaattcttctattagataaaaacaaagacaaagacaatgtgtgctgctattcctgctgactttaatactaatttaggtaaatccggattgaaaatctcccgtattatcgttggatgtatgtccttcggtagaaaaagctgggccgattgggttgttgaagataaggagaaagttttcacaattcttaagaaatgttatgataatgggttaagaacttttgatactgctgatgtatattccaatggatattctgaagttttattagctgaattcatcaaaaaatataatattaaaagagatagaattgtaattttaactaaattattttttccagtggattttgatgatcctgatttttcagttgctaaaactgggcaactattcctgcttatgaatatattaatagtaaaggattatcacgtaaacatataatggatgcagccaagggaagtgttgaaagattaggtacttacgctgatgtcattcaaattcatagatttgatccaacaactccaattgaagagacaatagaagcattacatgatattgtcaaattaggttatacaagatatattggagcatcaagtatgaaaacttatcaatttgttatgatgcaaaatgttgctgaaaacaataaatggacaaaatttatttcaatgcaaaactattataatttactttatagagaagaagaaaatgaaatgatggaatactgtaaattaactgatgttggaatcattccatggtcaccaaatgctagaggtattttaactcgtccttatggtaaagttggtgaatctaatcgtgaggaaaaggagagtggacgtgtgaaaaatttaagattagatgttttaagtgaaggtgatcaattgattttaaaaagggttgaagaattagcaaataaatataatacctcaatggcagtcatttcaatgtcatatgttttaaacaaaggttgctcaccaattgttggattcagtaaacctgaaagagttgatgatgcaattgaagcatttgcattccataagaaattaacaagtgaagatattgcttatttagaggaaccatatgaacttaaaccatggacttcttaagtataggtaattattggcactagtttcatcgtgaagaaccgtatcgtgtctgtttgataatttcagtttccctacggaaaattttgatccctacctattactatatatttcattttcaataacaagctgataagaacacatgtcactacaatacatagtaaacctttgaatctgcaaatgaatccagtatcgattgtacacctattctgttatcttttttgaattgggcgttagtagtactattagagaaataaaaataaattacaaagtgtaaacttcagacagctacaaatctagagcagcgcctgcttaaaatttaagatgatgtaataattgagccccctgtcataaattaaattaattaattatattaattaattggggctttcttatctttggattaatactttcacttatttcttttcatttgatatctgtgttaattggatatacattgttaaagtagcaacaatagaaacgttttaatgtcagaaaatagcaaagttaatactgcagttggtgaagatacccaagctgttaataatgataagggagttgctgagtctggagacgataagattattattattgataagagtattaaagacgacaacactagtaatgatgctaatgaggataaagatgataatgattttcttgatgattttgaagaactaactttttccgattacattgatgctaatcaaaaaactataactgctattcataaagattttctcaaaacaatttattctagaacggaagaacgtgaaacaaatttgatgaacagagttattgaacttgaatgtgaaaataaatttataaagcgaaaattacaaaattatgaaaatataaaggaaagcgatgataaattaatgcaagaattaaagaaaaagaatgaagagttggtgaaacagtttaatcagttaagtagctctattagtacaaataaaacacagatatcagcaaaagatgcaaaacttgaaattttgaaaaagtatcagagtaatgttaatattgaattactaccatatgatatgatgcttttgatagaaaagttgggaagttatagaaaagagactgatgatgtagtatctcgcttaaagatcattaatgaattgagtagtaacattgcacttaaaaatattgttacaaaaatgattgatacatatacgtcatcttcttcttattcttctagaagaaataactcgtactactagactgatgttttcacactgacacgttatattttgaagaaaacacccctagatcagttacaatagggtggcataatataagttagactttctatttaccctttatatttttgtatgatttcattatctttccaatgatgcatattttaagtagtgcttgattgtaattatgtaaatcattttaaagaaaaaaaacaaaaaacaaacagtttcgaaaccaataaaattgtctataatctcggaaaaagcttatctatcacaagaaatataatttgatgaagacgttacctaatggcttattcacttttgctgctcttctttgatttatatagttgtaatggaaaaaaccacgatttcaatatgtgaccagtgtaatgaaccctttgttgaagatacacgagactctaagaataatgaagatatcaaagataccatttttgacgattttgaaaaactatttttttctgattacattaatataaatgatatccataaagttttccttgaaacagtttactccagatccgaagaacgagaagcaaatttaatgaatagaattattgagcttgaatcagaaaataatcacatgatggaaaagttaaaagattaagaagatataaagaataaatatgataagtcagtacaagaactaaggaaaaaaatgaagatttagtaaaagattataatcagttagttgattcttttaacacgatcaaagctcaattctttgaaaaagatgtcaaacttgaaattttgaaaaaatatcaggaggaaatcaaaattgaattattaccaattgatattatccacatattgaaccttttaagaaaaataaatcaacctcctttaaataatgataacatattatcttatttaaaagtcattaatgagtcaattggtaacattgcactcaactatatgtttgaaaaaaagcttgatgcatatatatatatttgtgctaaaaagagggacgaagaatactggggaaatgcatgacttctctgtgtacaataatttccaaacagattacatgaagaaaaattctaagagtagcaagtttatgatataataatcaaatttgttatacttagtcatagtattgtaaagtatgcaaaataggtacgaaacgtgtgatcttaattcttttaaataaggagattatcttaagaatgatattaccatatatttaatcttataatacaaaggacattttatatttattaattattatttgatcatttatataatttttaagttcttattttataattaatttagcttgaaaagttctatacttcgtagttatcgcaagtttttaattttataatgctacccgagggctcatctggattttctcaatttgctcccatcttgttttccttcttttggctttatttttacttctttatttgttttgcgtctgagtcagttgataaaaaatacaatacgaaaaataaaaacgagagaataaacataatgttagtaaataacgacggcaaaaaagtagttgataaagatactgatgatgttaacaatgataaggatatcaaggatgatatttttgacgattttgaggaacttactttttcagactacctcaatgcaaatgagaaaagtataaatgagattcataaagattttcttaaaataatttattctaaaactgaagaacgggaggaacatttattaaacaatataacagaaattagttcagaaaatacttatttaaaggaaaagttacaagagtatgaaactatgaaaatagaatgtgaagaaattaaaaagaagtatactgagttaagtgaatctcacgtaaaacttcaagctgaagcaacagagaaagataaaaaacttagaatattgaaaagatatcaggatgaggtgaatattgatttgctaccatatgaagtgattgtaatgttggaggaactgaaaagaggagctcaatcagacaaatcaagatcaaaagtattcactcgtttagcagctattaataatgtgagtgataacacttcactcaaagaaatcgttaaagacaagattgataattacaagttaacttatggcaatggtcgttattaagcatgcattagacagtggctctctgaaatcaaccatgcgtcgcagagtcggtattttttttattttcagttttcatttttttccatttttcagttgagttcatgataataatgctaataatactaataatgatactgatggaaattagttaattcaaattatttcaaatttatttttgtattcatgcattaatatgttttttatattttgatcttttattatatattataccaacaatcaatatgtccaatatacaaaacgttgaagtaccaacactcccagtaccaggagctcctcaaactccacctccacaatctgtttcagatcaagtggagaaatttcttcaaaattcaaaagattatatgtcagcacatccttttataacgtttatgggatgttttgcagctacttatgttgcagctggtgcttataagaaattttatggttcatcttctggtaaatattttaaaggtggttttgatccaaaaatgaatgcaaaggaagctttacgtatcttagatttaaaggaaactaatattaaccttaaaagattaaaggataatcatagaagaattatgttacttaaccatccagataaaggtggttctccatatattgcaactaaagttaatgaagctaaagatttcctcataaagagaggtggtcttaaatgagtttcatttatatgttagtattagtcatttagcattacttgtttatagttattaatatatagtattattacaatcatttcatgaatcattctttgaatacattaaacgttattaataataagattatttatttatatttacagaatttttagttaagattcaccaaattttccaaaatggtttcttagtatcatttttaacttcatttaatttatttaactctaattgtcgttgtgcaatttccattgcttgtatcatattttcatcttccttttgctttatatgttcagcataaacaacatgtttattaccaaatctatcctttataaattcattatttgttgcagtttcaccaactaattgattctctgcatttttttcatacattatagatggtaatggtttttgtggaattggtttatcagctttataataatataaatcattataatcatccattgataaatctccaattataaattctttaattcttaattgtaatcttctaaatggtgaaaatatattatcatgatcattccatttatagaaaaaaactccaaatattaaaactgtatatatactcacttttgctgttaaatctgctcctctattaaatccactcttatgattaactttacgtaaaactttatatctaccaggatataattctgatggtggtcttggataatattgtaatttcttcatatcaattttaatcttttgataatccgttaaatcacgagctattttacctgtatttttcttcataactgatggtgcattatattcacttgggtacccttcagctggccttaaatcagttggatcgtatggattatatggtgcttttggttgaacccatcctggtgggttgggtcttctctctaattcaggaaatccatttttattagatttatcttcactcattattgtctgatgtatgtgatatatattaactaatgtttgacctcccaaactcacaaatatatactaaaaataaaccttcatcttcagtaaatcaaaaatttgcgtgcacagtgaaatttcatgaattcatgtttacctttaccagatccctcactggatttattcaagtttaagcccagttatataaaacaccttttctttcaggaacatttatcgaagcaatgtctgtgtgtccgtttctgtcactagaggcattggatacacgtgttaccgttaataatggtagagaaattgagaaaaaaccttcaagatggtcatctaatgaattcagattttatatggcatgtttctgtgtagttgttccaatattgtttaaaactgcaatggatgcaagtaatgaaactaatccaaattataatatatataagggattgttatctgatggttggatatttggtaggaaagttgataattcagatctacagtaccgttttttcagagataattttgtcatgttattagcgttcgttggtatccataaattattaagaattggttcaaggtacctaaaaattgaaagattggattttgatttgggttttggtttgatttttttctttgtattacatggattcaattgtattagaatattatttttgttatttattgcatttgcaataacaaggatatttaaaaaaagacctctacttgcacaaattttggtgtgggtttacggtatttcaactttatttttgaatgataactatagacaaattaaatttggacaaattataagtcaattggcatttatggactcttatagaggattaattgcacgttgggatgttttctataatttcacattattaagaattttaagttttaatattgattatttaaagagatttaccataattgaaaaatcaaataatgagataccattaacacaagttgaaacaccattaaaggctaaaactagcgaagaagatttatcatatccttctgagggaaagcaaaatgagataccagttccagcaagttcacatttaacagagagacaaagattagatgctccattaccattaactgattattcattcaagaattatcttgcttacattctttacactccattatatattgttggtccaatcattacattcaacgatttcatatatcaatcaagacatacattaccatcaattacattgaaaagaaacttagtttatggattaagattaatcttctgtttcattgtaatggaatttatattacattatatctatgttgttgcagtgtccaaagccaaagcatggcatggagattcaccatttcaaatttccatgattggatttttcaatttgaatattatttggatgaaattgttgattccttggagattattcagattttgggcattatgtgataatatagacccacctgagaatatgattagatgtatggataataatttctccacgatgcaattttggagagcttggcatagatcttataataaatgggttatcagatacatttatgttccattaggtgggtctaattatagaattttgggatcacttgcagttttttcatttgttgctatctggcatgatattgaattaaggttattaatttggggttgggttgttgttttatttttattaccggaaatgattgcaacaaaggttattaaaccatataaaaataagtggtggtatagacatgcatgtgcattaggtgcagtttccaatatctggatgatgatgttagctaacctatttggattttgtcttggtaaggatggaatggttaaattattaaaggatatgttaactacatttgatggtattgttttctttgttacatctacaatttgtttgttcattgcagctcaagtaatgtttgaactcagagaagctgaaaaaagaagaggtgttgatgttaaatgttaatctacttagaaatacaatatacgtttataattggtatcatataaatttatataaaccagtacattattattctattatatcaattattgtatttgttcttgtattcacgtggagtttgcagatctttcttgtttaaactccacataccgagtttctttttctgtgcttttgtttgtcttttacggtatatactttctttaccatcaaattcagctcccgctttggcttcataaacagttgcaaggccaattttgatcatctcttcactaacatccttaaaacctgtccattttaaaaccagtactttagcaacaactctttgatattgatctaaatgtaatggtttaatgtataaccatctccccaaaatatactgtcgcagccatatcaatgcctcttcagagaatggttgtgcaggtctaccaaaatgagctctttcaggtgcatctgcaccacaaattcgaacagctattgtttcaccctttaattctttaaatcggattgatttcaggaactttccgtaaccaaccccaaccagagagaaacccacctggtaaatgatatagatgaaagttatcaccatctccaacagatgtcactttaccataaataaatctttttctgaaataatatgatggtatttcaatagctcttttaatacgtcgaaaatatctgtgatatagggagtaaccgccaatgataggtgactgatgttccaagtccatatagaagcaccagtggatgatagagtgtcacttctcgtgacattatttatatagcaaatgtttaggttgtaaactgatcaagaaaaagaaacaataacaaatcagttaaatgctggatcaatcaaattcttcgatattgtcatgtccataatttccaattccgattttcttactgatcatattatcatatttagagtattaagttgtaatgcaacgtaaaagagtaagtactatatataaagttgttatatagtctctgtatattgagtttaattctatagaaaacacccaatggtcaggacttagagagattaaattgtaattaaccgcttaattccgagtatcatcttaacaagtagtctctttttctgaccaaacaaatcaagatgatgaacattggattatacactagaaacagccggatgatacctagacttacaactatattaactccaagacccttaacacaagttagattacaacattatggaagaagaaaaccaacttatgtctattttgaccaaccgaagagtcaatatcaagggtatcaaagaagaagcaatggtaacagttggagagatatttggaggaatatgaatgttcaacaacgtcgaattgcatatagttttggaggtatggtattcttttttattgttttacacattcaacaggctccagttacacatagatacagacttatgattactgcagattggattgaaaatatattcactaatatgtcatttagacaagttatgtcacaatatggtgcatatgtattaccatcatatcatccattatccaagcaagtttctagtattatggtaagattaattagtgcagctcatgattatacagatcctgatactggtgaaaagataaacttatttacttatttaggtaaaagtgatataccacttgatgaatgggaattttatgtgattgatgatgttagaatgggacaagcatcaccaaatgcatttgtcattggaggtggtaaagttttcatatttaaatccattttaccaatttgtgaagatgaggatggtttagcaacagttttatcacatgaattaggacatttattagcagatcatctggggagaaaaattaacactgtcaccatttttcattacattacaattaattttgttttcactgtttggtacatctcaaccgggtgatatattagttaatgcatttcttaacacatcattttcacgagaaatggaaacagaggcagattatattggtttaatggttatgtcaagagcatgttttaatccacaacaagctccaaaattatggaaaaatatgatgaattatgaaaagaaagttggacaaaatgttccagagctattatctacacatccaagttcagagaaaagatttcaaaatatatcacaatggatgccaagagcagtaggtgtttacgatagaagtggatgtagtcaaagaaatgcatttgacagttggggctagtttgttaaggtgatatgttgataagaatgttttgtagcttataataaaaaaacatgtataataacatcatttaacgataacttttcatgtgaaacaaagaagtcaaattaaatttaatgaaaatttcttcacatggtgataattttcatgtcgattttgtcatgttctattttcatcaccacttttttcttttcttttttactttcaattaatttcttttaacaagtacaattaacaatggcttacgatcttgtctgtttaggtaacccacttcttgatattcaagttgatgttcaaaaggaatatttagataaatacgaattaaaggaaaacgatgcaattcttgcagaaccaaagcacatgccaattttcgatgaaattttaaaatttgatgatgttaaacttgttgcaggtggtgcagcacaaaacactgctagaggtgcacaatatgttcttcctgctgaatctgttctttattttggttccgttggtaaggatatctatgcagataaattaattgaagctaataaatcagttggtttaactacctcatacatggttcaagatgatattgcaaccggtaaatgtggtgctttaatcaatggtgttaacagatctttagttactgatttagcagcagctaaccatttcaaaccatctcatttagaaaaaccagaaaactgggctcacgttgaaggtgcaaaggcattttatattggtggtttccatttaactgtttcacctgaagctattcaattattaggtaaacatgcagcaaaggaaaacaaagatttcattatgaacttctctgctccatttattccacaattcttcaaagatgctttagatagttgtgttccatatgcagattacattatctgtaatgaatctgaagctgcagcttatgcagaatctcacggtttagatactaaggatttaactgaaattgctaaatatgttgcaaaattaccaaaagttaacgaaaacaaaccaagaattgttatcttcactcaaggtactgattctactttagcagtttcatacaatgcaaaggcagattcatttgatgttaaatcatttgctgttcatgctttagaatcatctaaaatcgctgatactaatggtgctggtgatgcatttgcagctggttttactgcaggtttagttcaaggtaaaactttagatgaatctattgatatgggtcattggttagctaaactttcaattcaagaaattggtccatcttatccattcccaaagcaaacttataacgcttaagtctagctataaatatttatattataaaaaagtgtataaaacaaattttagttgaatattttatgtaaagaagaaaatattttagtcttctgcaacatcttcaatcgttggttcacgtctctttgtacttgtagtggaagttgattgaacagctgatgtattagtgtctttaatttcttcaattttattagttggagcagttgcaggtgctgtggttgtagttgatactgtaggttttgcaacggtttcatcaactgtttttgctttctttacctttttacctttcttagatttacttggatcttcccattcatagacaggtttgaaactatctaaaacaccaacatctgcgaataagttcgggaatagccaaaattgttgcttcattgttgcccaagtaatgacatatatgatggttctgacaattgcagtaccaaagaaaacaccaactaaacataggcaagcagttgataagtaccagacacctttacgcatccatagtggccataatgggaataagatgattgtgaagactgcaattacggctaagatagaatataatggcattaatggattcagtggagtgaaattccatgcataataagcatcaggttgaataattgccttttgttgaacttctaaagcaggtgtatttttatctatttgataaccttgctttttagcaacattagtcttcattttaacaacggggacgattaattgattttgaataagtaacacaaaaatttgattaattgcattaatatcatttggaattggcggcatatcttttaaatgttttgcttgttgtttttgaaattctggtgattgaactgcacgtacaaatcttttaaatctaaagaaatcaaccttagatttagttgttgaaaggacaccctgtctttgtttaagcagagtattataacgaactgcagttgcaactcctaatgcaacagggttcttctcgtttgaaagaggaactctcttttcagtttgttgggtagacattgtcaaagatgcttatattatttatacaattgtaaacacaaaggtagaacaccagaagaatgggtgtgtcaaagttgatgaaaaattggaattcaagattaatttcgtgcattagataaaaaatcttcgtacctgcttgttatctcaatcttttatatacaacagaggacttattaaagggagagcaatatggtgtatgactcgggtgagacagggtcattcagtcatcgtctagtttgtttccccagtatggggaataatgatggtgctgaagatgtactagatcatataaatgataggaatagtataaatgactcagtgatagacaatcaaaatattacaaatcatatcgctaaggaagaaatagatgtacctgaaatgggtagtattcacagctctgtattgcatagaatgttggataatgaaacattttatggggcagacgataatgataaagttcgtttgagcaaaatgtataataaatactccaatacaaaacataatttagaatttactgattttgatacttacaatcgaatattactaagagaagaagtattaaggggaaagctagataatctggcacagaggaaagctagaaatgttgaacatggtagaatgaagtaatgccttgccaacatttgatgaatatgaacttaatgagatgtatgttggtggctcggttgacgagcgacgaactggtaataatggtagatctaataagatatttaatttattaagaggtgttaaaagtagagatagtgaatataaagctgaaagaaacaatagaaatgaaactgaaaatgacaaagagaaggaaaaggagaagcatttttatgaagattatgtgtcaactttcagttcaataccgatagatgatgatattcgaattgaagatttacctattgattatcaacctttcagaaaaatgaacagagatctggaatttaattcaaatggaaatggaatgaaatggtaatggtaatggcaatataagttataataatcacaaacatgattttgatgatgatatcgatatagttgtcagtggtcaagataaattggattatgatttccatagaattgaattatataaagatatcgatcctgaacatcgtgattcaaatatacccaaatcatcaaataaatgtatgaaatttttattaatgttaattgataggctcaatatcttcaaaatgattagaattcaacgtgctaataaatatcaaattcaaagaaaattaaatcttcggcacttacatcaaatagcattaggtggaacattaggtgttggattattattgtcttctggtaaggcattttccattgcaggaccatttggttgtttgattggatttgttattggtgcattcatagttattgccacaatgttatccttctgtgagattgttacattgattccattatgtggtggtgttagtggtattgcatctcgatttgttgatgatgcatttggtttctcattaggtgttgtttattggattacttatacagttagtttaccaactgaaattacagctgcatcaattatgctttcattttattcgaatttaaatatacctggtgcaagtacagctggttggattacattatttatatgttttacaataatgttaaatttgtttgatattcgtgtttatggagaatttgagtattactctacaattattaaactactgattttacttgcattgatgttatatatgattattatgaatagaggtggtgcaggaccagaacatcaagtcattggatttaaatattgggattcacatttgagtgatataagtgaacatttaacatttggattatttcgaccaacatttgatgtagctgataaaggaatgggagcattaaatggtattggaggtaatttaggtagatttttacaaattttgatggcatcagttattgcatgttatgcatatgttggaacagaaattgttattttagcaggtagtgaatctagaaatccaagagaatctataccaagtgctacaaagaatatttatatcagaattgttgtattttatcttgttgctatatttttagttggtttaaatatttatagtggagatccaagattattaagatatttttcaagtgaaagagatactagatcacctgatgaattgattaagttacaaaatgaagttattgaacatttaggtactggatagatgttctaatgaaataataacttgggcgggattttcaaatggtaatcaaagtccatggattattgctatacaaagtacgggattatgttcatttgcagctgtcgtcaatgcatttttaatttattttgccctaactgctgcatcatcacaactttacgcaagttcaagaaccttatattttatgtcaattcaaaacaaggcacctaaaatattttcagtttgtactaagagaggtgtcccttatatgagtgttttatttactggatcatttggattattaagttatttaagtgttcaaaaggatacagcattaatttttgaaagattagttagtgtttgtgcaactgctggattattagtttggtcaggtatgtgtctttcatttataagattttattatgcattaaggttaagacctgatataattagtaggaatgatgttgattatccatatagatcaccatttcaaccatacttagcagttgccggattatttttaagtttattcttagtttttgcatcaggatttgttgttttccttcatggtgactggtcgccattatttttcatttcaagttatggatgtgttttcttatttattttatgttatttaggttggtggattttacgtcggagtaaaattgagagattagatcaaattgatttagattcaggtagaagagaaattgatcgtgttatttgggaagatgagaggtattatgcaagtaattttaaggagattatacaaagaggtgttaatttacttatctgataaatagacaatatatagttttgtttactttataaatattattttgattattatacaatgagtgtactatacaatggaattactatatcataatatactatgatttaagtcttttcaataaaagttctttcttcttttttattataaaagcctggacatctggggtattagtaaagttcaaacgtgttaaaccttcattattagactttattgattcataatctatattaattggataagaatcaggtaattttgcattacggaagttatttaacctattatcatcagaatttttcgaattaaattcctttctttcacgttcagcctcctgaagtaaaatttgaacatcaggcaattccttggctcttccaaaatataaatgacctttaattgatgtaccattagatgttgattgtggataatgtgggccacctaatttacggatggacgcgtcgcatcgtcctacgttgatgtaaaagtgaatttactgtatcattagtatctctcaactgttcatctgatagatgcggatcattcaatcttataagagcagcatttattctcctgagtaaacctttcctacgagcttccagctgttgtagatccattaacacaaagcaaagacaaaagcaaaagcaaaagcaaaagaaaaccaagaaaaaagaaaagactacgtaactcttctaaaatcaaaaaattcacagttgataataaatttctcctattaataataataaacaagacaaacgcgatatctatattatggacaaagtcgtatactttattttaatctattttaattactcttgatgctggtttatttgctcttctttctttgattcttatatctaactctcttgtttctcttataaacaaaatgctttctgttggtggacgtaagttaagaccattagttattggatcagttgttgtccttgcactgattctcttctcattatcctggagtggatcccctattcctggttcaataacatcagaaactattcataaggctgattatggtatcggtgaatctgttcaacctgctaataaattaatttctaatgatgatactctattatcgggtgctacaattgaacaagataaaaaagatgctgaaaagaagaaacaatttgttgttggttcttcaaaatctgatgtatcatcaggttctgatgcttctttaaagggtaaattacaagataaaaataaacctgaaactgaaatgactagttttgcagattctaaagattctgatgaagttgctgctgtaaaaccaaaggctaaagttgcttctggtgcagattctgctgatgatgataagaccaatgttaaaggtggtaaagtcgattctgttaaagataaatcggcatctggttctacatctgattcagattatgattatgttattatgattgatgcaggttccactggttcccgtgttcatgtttatacatttgatacctatgtttctccgccagttcttattaatgaagatttcaaaatgcttaaacctggtctctcatcatttgatgtcgatacagttggtgcagctgcttcactcgatccattactcgaattagcattaaaatcaattccaaaggagaaacattcttgtactcctgttgcagttaaagcgactgctggtttaagattattaggtacagcgaaatcagatgctatattaaaggaagttagacgtcatttagaagaagattacccatttcctgttgttgaaggtgatggtatttccatcatggatggttctgatgaaggtgtttatgcttggatcacaaccaattatttattgaaaaatattggatcttcaaagaaacttgataccgctgctgtctttgatttaggtggtggttcaactcaaattgtctttgaaccaactgatggtgaaaaaattttagaaggtgaacataaatatgaaattaattttggtggtagagatttcatcctttatcaatattctcatctcggttatggtttaatgcaagctagaaataaagttaatgccgctgtattaaaggctgttttagctgatccaaaatcaaaagttcaaaaatcaaaacttgttccattgaatgctaatcaattgaaaaataaagacgctattatttcaactattgatattgaaaatccttgtatcccacctggtgtcactgctgataatgttgttgttgaaatggaaaatggtgataaatatgctgttactttcatttcaccagaaaatgaaactccatcatcacttgctggtcaatgtaaattattaacagatacaatcttaaataaagatctcgcatgtgaatctaaatcatgttcatttaatggtgtctatcaaccatcattccttgatcaattttctacattggctgatatgtacgttttctcatatttctatgatcgtttacaaccaattggtatgccagattcctttacattaaaagaaatgaatgatattatgtcatctgtttgttcaggttctcatttatgggatcaatatttcacacaagctgctcatatcaaagagcttgaagatgaaccattatggtgtatggatcttaactttatgacttctcttctgcatacaggttatgatatcccacttacaagagaattacgtactgctaaaacaattggtggtaatgaacttggatggtgtttgggtgcttctttaccacttcttgataaaaccaactggaaatgtaaagtcactaagttatagtttagtttattaatatattttatagttaaagttaatgtaatacttaaaattactatctccacgcctgttatatccgttatcgcagtggaaataagaaatcgcaatttatttaaaaggagcacatttctttttccattttctttactggaatggatactgcattattaataagaatattgttccctccatattcaattactaacttgtataaatacactgatcaatgcagaatagtacaacatcacctcctttcattcgtcgctcctcttcatcagctcaaaaggaaccagttttacatgattcactacttttacaatcaattcatcagcaaattccatcttctatatcatcaacttcgtcatccagtacgtcattatcagttgtaattaatggtaaaaatggtaataatcttcaaaactcatcttatattgctgatggtttagagaaactgcatttaagaaataatcatcaacataattgtatagcatcagcacctgcttgtccgaataatgatttagaaaatgatgcagtattgtttaatactttgaataatacagaaggtttatcatctgtacgatctcatatggatttagctaaaactgctaatagtgtacgtactttagcaaaacgtctgaatagagcaactatatcattaaatgttaaatcagttataattataactaaggcaagagataattcacttatttatttaacaaaggaaatggttgaatggttattagttaatttttcaagtatgaatgtttatgttgataaaaaacttgaaacttcacatagatttgattatcaaggattgttaaatgatgtaccaactgcaacggttagattaaaattttgggataaacaattaatactagcaaattcagttccatttgattttgtaattacattaggtggtgatggtacagttttacatgcttcaactatgtttcaaaatgttgttcctccaattatttcattttcattaggtagtttaggatttttaactaattttgaatttgaaaattttagagaagttttatcaaaggctgcaactaagggtgttaaaactgatttacgtatgagattcacatgtaaagtacatgcagctgatggttacaattatttgtgaacaacaagttttaaatgaactgactattgatagaggaccttcaccttatgttacaatgttagaattatatggtgatgaacatttattaacagttgcacaagctgatggtttaataattgcaactccaacaggctcgaactgcttatagtttatcagctggtggatcattagtacatcctgaggtgagttgtatttgtattacaccaatttgtccacatacattatcatttagaccaataatggtacccgattcaattaaattaacggttaaagtaccatcgcgtagtagatcaactgcatgggcagcatttgatggtagaaatagagtgaaattagaagttggtggatatgttacaatttgtgcatcaagattcccattcccaacagttaaaaatgaaaataatttatattttgaaaatgttagtagagttttaaattggaatgtacgtaaggaacaaaaaggttttaaacatttattaagtgataaaaataaaaaaatatgtgatgctgaagaaaatgcaagtattgctgctggttcagatacaattcaaactgatgatgaagaattatgggatattgattactctgatcttgatgaaaattgatgttaccatgttaagtattataaagtgtctttttttctttttttttttctttttttcactgttctgaattcttcagctactttactactattagtttgtctgtatctctgtagtttatattgatatttacatggtttatatagttatctttatcgatgtaactaatgataattgatagtgtaatgacgcgcctggaaaaatcagcgacgatgggacgataccgatttggactggcttaataatatacttgattgcataatataaatttattttcttaaggatttattttatagtaagcctttagacacatgcatgcagtttaaaggagcttattgctggatcttataagtgtatagtatagtaattacaatggattcaagtctgcactcagttgattcggttgatatggctgctaataaagatgatgtacatgccattgatattgatgcaccaattgatatgtctaaaaatgatcaagaattagcattacctacagttcctgttctggatgatattgataatatcgaaaatatagatgaaatatctgaagatgatgactccggtcaagatggtaatgatgatggtgatagtgatatgtttgttgaagatatgaataattttgaaggtgatttaaatgaaattgattttgatgctaatacagaacatttcttagaaaaagcaccaccaggttttgactcaattactggtcattatacttttcaaatcaaggatctagcatcactttttgttgaaaaagaacgttttaaaggtccttcctttgaagttggtgattacgtgtttaatttgatcttagtctgtcaaaaaagaaatcatttagttttgtcagtatatcttgaaggtcatcctaaagatcatgttaaaaaggaaaatggaaatgataatgaaaacgatgatgataaagatcctggtgaagtatggtcattccctgcacatttcactattgatgcatggaatccggctaatccgaaactacacaaatcaaataataccagatttagatataatcaacgtgtgacagattgggggtttgttcaatttattgatccaaagggtgccgttgaatcttcatttatgaaatcaaatatggttaatataactacttactgttagagttattgatgattatacacatgttctttattcaaattacagagattactcctccaaaaaatatacaggttatgtcggtattgaaaatcaaggtgcaacttgttatttgaattctttgttacaatcatatttttttacaaaatcttttagaaagaaagtctatcaaattccaaccgaggatgaaattgatctttcaatccaaccttatagtgaatataaaaaacaggctaaaacagtctctttagctttacaaagaattttctacaaacttcaaacatcagatgtttctattcaatcaatggagctaactcactcatttggttggactactgctgatgctttcacacaacatgatgttcaagaactgaacagaatactgatggatcgtcttgaaacctaaaatgaaaggaacagaaattgatggttgtttaaatgatatttttgttggtaaaatgaaaagttttattcgttgtatcaacgttgactatgaaagtagtagaacagaagatttttgggatattcaattaaacgttaagggaatgaaaaatattaaggaaagttttgataattatattgaattggaaatactggatggtgataataaatatgatgcttccggatatggtttacaagatgctgaaaaaggtgtcatttttgaaagttttccagatgttttacacattcaattgaaaagatatgaatacgattttgaaacatgataatatggtcaaaattaatgatagattcgaattctttgatgaaattgatctacagccatatattagtaaaactgttgaacaatatggtgaaaactggaattataagttacatggtgttttagttcatcagggtgatgtctctgttggtcactattatgccatgattaaaccaaatgatgaagataagtggtttaagtttgacgatgacattgtttcacgtgttactcatcatactatctatgaagaaggttttggatgtggtgccccagaaaatgtaactaaacaaatgactagagaagaatatcaaaactatattattaaacatcatacctccgcttatatgttagtttatattagagaatctaaaatccctgatgtgttagcggaagttgaagaatctgacattccacctcatatttctaaacaaatcgaatatgaaatccgcagaggaagcaagaatcaaaaaggaaagagaagaaatgcatttatatgttaattttaatttatttactgatgaatacattccataagtttgaaggttttgatatcgggccaaatgtcgaggattcccattattttaataaagatttatatgatgaaggttcattcccattaacattcagaatattgaagactgactcttggaaatcgatttatactgtaatttgtgatttacttggtaaagatccatcttatgctgataaattgagattatggaatatagttaagagagataatagaacatatagaccagatttcccaattgacgaatacatctccaatgttgaagatataaaaattggtgatgtttgtaacaaattgaatgatggagtttctagaagaaaatattcaggccatgaaaggccaatgttaatttctttatatttggaagatgcagcaaaagatttgaagtatcttgctaatcattcatctaatttaggagctattgaaaatgatactaatgtggaaaatgttgacaatttaattgagtttatggacgcaaatccaaataatgatgctgtgttagaaccaattctaaatacatctaacattctagttttcatcaaatatttttcattgaaagctcaaaagcttaaatctatgtcacatttgatactcccacatgaatcaactgttgaatttatagaaagtttgataaataatattttgactattcccgatgatactatggttacatttactgaagaattaagctaccataaaaggttggatattaaacctacaagtacattgtatcaatctgaaatttcaaatggtgatattatatgtgctactatttgtgatacaactattgataataccatcaaattgaaaaatgcagatatgtgctacgaatatcttgagagtagagttcattttattttctctaaactgcaaattattgatgaagatgatgaagattatgtttttgttgatgttagtgaacaaaaaaataattccaagaatacaactgttgatgtctggttatcatataatagtacatattttgatttggttacagttataggagaagctatctctgttgatcctgaatatattaaattatctcatacttcaaataatcaaaagaatgatcttagatcagattatgacttcaagaaatcattggcaaatatatctaaacaaaatacaatctatttaaattatgaaatactcaaaattccattaaaacaatttgaaggtatggaattatatagtattttctgggttggtaatggtatttgtaaggatgaaagacatgatttctatttaccaaaatcaagtacacttgaaaatattgttactaagatgcaatctaaaatagatatatccgatgatgaaaaggattcagcattttgctggattcctgatagcagccacaaaatcaataaaactttattattggatgatgaatttgatggtaatggtgctctggttattggtattttcccccaattcaaagaaatttatcaaaatcaaattaacaatgaaaatgtgaaattgatcaatggtttccaatgttatggaagtcctgagaatacacatggtttaccattcatatttgatgtcgtaaggggtgaaaaatttcctgatacaatgttaagattaagaaaactacttggattgtctgacaaggaatttaaatgtgcaaaatttggtatttcgggtacttctttccaatattttgataaagttgaatcagatacggaattgtttcaaattttcgaaagaaaagactacaagttgttcattgatcatcctgatagaaaatccagacgtgcatctcatcaatcatctattactatcaaatgatattgtttaatgcaacgattttacttatataaatattcacatatatcatcttaattaatgcttttaaaaattggtttgcttgtatttatgtatctcgagaattgtcttttaagtactctaatcttctgtaatctgtactgctcattttgttttggaaagtttcagaatcagagcttcctaaaactccaattgcgtaaacatccaacttcttccaacctttctctgttctcttattattgacaaattcaggcacctttaaaagattctgcactcactatgagagcatctatgttttctagttgtgcagttggaccgcaaatgtcagttgatttcataaaaatcgactttaacagttgatccaataatattcaagaatgattgcacattgtcaactctattttcgtatggttgcatatattcagcatattttttattctttaataattctggtcctgtaactcctataattaacgtatctttagctaaaaatgctgatattgtgagtagtattttatgaccatcgtgtaaatgatcaaaagttcctccaacagcaacaactggtatagaaccaatcaatgcatctggtttgtgaagattgtatttttgaggtttcaaatcgaaattgttgaattgctgggtaagcctttatatgtatgttattcctgttttaaatgtcgaatataagatttaggtatttcagataaatcaacatttgatgatactgttgctacatcccagttcttctttgcaattgtttcgttgtagttttcattataaaacaagctaaaaatttgataatcttttttatcctccttaggatactctaaagaatgtattatatactttatctagttgattcagtaaaattgatatggtaacgggttctagtgattttggaataacaagaatataaattgatttttctggattctctttcactaaatctctaaaaacataacctaaaaaatcttctgactgtgattcttcctctgatatgacagctaacattattctgtaggaaatgtttgaatggccaaaggaaaacctgtccgtagaagccataagattaccccagggttcaaaaatattttgtgcatcagatctgcactatagcatgaaaattatttcaaccaagttgttgactttacaacatgcattcttcctctggtatatatagaatatacatctaaatatgtccactgaattggaaaaactactagagcagcaacaaagaggaaaatatgtcccagctgcaaaaatacgtgctttgatgaaagaaaatgatgaagtatcaccagaagaacaacaaaaacaagattgggagaaattaaagaagaggattaatggaattgttaataaagtcaataaggaaaacttgaaaaccatggttgtagaaatcttcaaagttaatatattgagaggaaaaggattattctgtaatagtttgatggcatcgcaacaactgtcatcatcacatactggtgtttatgcatcattggtatgtgttttaaactctaagataccggaaataggtaacttattgataaggcgattggtttccagatataaaagatattatagaaaagaagaagaagctctgtgtactagcactgttttatttattgctaacttagttttgtttcatgtatgttcaattgatttaataattcagattgtaaacgaattgatggaaaaaccaacaaactttagtgttaaactagtggttgatgtttttgaaaacatcggtccatttatctatgatgaaaatccttcatggtttgatagtgtgaaggatacacttcgttctgtgatgaatgaaaatattgtcaacgatagaattcagttttcaattgaaaacttgttcaacgttctaaaggaaaaaattgatttatacgatggaatagagagtgatttggatcttgtggatgaggatgattgtgtagttcatcaaatcaatttgaaagataaaaattcaacagattctcagtttgatgtttttcactttgatgaaaactacaaagaatcgaacgagaagtacagggctttgaagactgaaattttaggaagtgatgatgaagatggtgaggatgatcaaacttcaggtctagatacaaatgaaactggaaataatgaagaccataactctgatttttccagtgataatgaaaacattgatgaaagtgatgacgaagacattgataacagtaacaatttaatggagaaaggaaagttaactgttcaaattaaagatttaactgaacaagaacttactaactttcaaaagaatgtttatttaactatcatgtctagtatgagtccagaagaggttactcataaactccttcgattaccagcgattgaccctgaaagaaaagagtacatgttggttgatatggttgtcaaatgttgtgctcaagaaaaggtttattcaaagtattatgggttgattggtgaaattttaattgttttaggaccaagatggtctgatgcatttgaaacattgtttaaagaaaattatcaaaattgtcataagtatgaaacagtgttaataagaaatattggtgcattttggggacatatgcttgcttctgataagcttggatgggaatgcttacaagctgtcgaactgactgaagaaagtacaacatcatctggtcgtatttttcttaaatttgtattccaaaaaatacttgaagaaattggaattaatcattttcttgaacgtgtcgatgaaccatatattcaagaatatcttgttggtattttccctaaaaccaatgccgaacatcttagattctctatcaactattttaccgctatcggactaggtaaattaacagataacatgagaaaagctttggaagccctgccacctgatgttgaaaccattgctggtgattccagtgatgaaagtgcctctagtcgtggaagatctgtttcaagatcaagatcacgttcatattccaggtctagatcaggctcgtattcatcttctgaaagaaatggaaactcgaagacaaataaaagaggtagagttgaaacccgtagtagatctccaagaagaagagatgaaagttactcaagatcaagatctggatctccaagaaggagtgataaaccggcaattccatctggtcctagatcttattctggttatcgtggtggttatcgtggagctggaagaggtggttatcgaaaccagggtggtgaccgtggtcgtggaggatacaatagaaactcttctgagtatcgtagaactgataattattataggggtggaagatttgaggataatgcttactcttatagagaaagaggtggttacagaggaagatacagaggaaatgaaagagaaagaggatcagatcgtagtgccagataaaagtggcgtttgtcatattacatttattactaaaaacattaaattaattagaaatttctatatcgtacaataggtaaactctacgtgtattttttaccttgtttggaatagtgtttgaaaacagaaaatgatatcataaggataatttttcagtagcttttgctagctctgtctctggagtattagcattgtaaggatgtttaccaactggaattgacagagtttcagatgatgaccttaaatcaaattcacttaacccaacaacggcaccaaatttgtggaatctttccatatagtttgcttttctcttatcacacatctcaactaaagttgggaaataaactttatgttggtactcaaaatctactctaccttcgaaatctttatccaattgttcttcatgaacatagttaatgaaatcagcatcaaaaactaatttttctctagttaaaggatcaataaatggataaatcaattttaaaaatgctctacctaaaaatggaatattagttaataaagctttacccaatctttcaggataatgtgtttgtaagatatgtaaaacttccctaccaacagataaaggtggaatttttgatgtttcaacatcagcactaatctctggatgttgcttgaaatcaatcaataaagccaatgaatcttgaccagaaggcattaaatcaatagttctttcaagatagtaaactaaatgttgaacttgtctgtgtgaagtttttgtattttgtcttcctggttttaaatatagacaaggtcttgcatcgttatcaaaacctaaaacaacttgtttaccagtagtaccttctggtgaaactacttcagctgaaaccttattctgggaatcaacttgatggttgatgccaaattctcttctccaggcgatagttccttcaattctatctattgcatctttgacaacccatttagttgcacgtaaatatcttaaaatacattctcttgtaacccaagctttttcatcatcaataagaggttctttttcattactactgtgttcctttattgaaatttttaattctggatcttggaaatgtttcaaaactgtaagatatttttcgttttgttcatctgttagaggcttctcctctggtggtgcaacaccagcaactggtttttcaaaaggaacatcaactttaataagatctttttgaggtttttttgcaacttcagccttcttcttaccaaaaccaaacatacttaccctgtcttagataaacttcaagtgttattccatcgaaaaactcatgaaaccagtgaaacaccattatagaagaagatgaataatgcatttttccgcaaaaactttccgcggatttagtgtatatcatgctattctctgctattatcggccttagtaagtgtatgtgtaaattgataagtgtaagtgtatgtgtaaattgataagtgtaagtgttctttaattttacaaaataacttagaaaacaatcaaagtttattaattatacagttataaatacatcagtagttcaaaaattcaagttcttaaactttttcatcatacttttctttttcttttcttcaccttcaccggaattcgattcactcttctttcgtccatgaagactaaatccgagtttgtgatgatgtttagatgtagattcatttgccaaactctgatattcagtagcttttgcatttagtttctgctgttgtaattgctgttgttgttgtctctgttgttgttcttgtaattgtttctgtactattgcaggatcagtagaatcatcgtataagaattgtggaattggtttcttttccatcttctgtttcaatgggaaatcaaattcatcatcctgtattaacgttatatcaccaagcatatcccaaactgtatatatttcatctgtaccaataataatatttctattaagttcattttccaaagatgagatagaactcagttccgatggtgttagtcctccagcacagaaaagtatcaatttttgtctagatgcatcattgctatttttactacttttccatttaggttgatttcttacagtattcataccttccatttccattggagttggacccgctttaacaaatgggaaagttttcaaactttcatcgtcttcatctgcataaccttttgtatcgatagttttagttgtgtaaaactcagataatttgttatacactaatttggaaatgatattactatatgatggtgtatagattttcatttgaacttccgtatcttcaactccaaaatatgttttatccttagttactgggacacctaatttttcctttatcactgtaaatccaatggattgaaggttttggaaaagtttcatgacattattagccttttcaggcattgagaattgcaataatttttctaaatcagcctttatgattccacctctgtaaattgaatatgcgactaacattcttatcttattatagacattaatctgtggattgttcaataattggactaacccatcagtaactggaacttttaatttttcaactggacccagaccagcagcacacagattttcaaatgtcataatatcacctaaatgttctttctctaaaatatcccacattttagcacataaattataatgaccagtaatcaaagcctttctttcagcatgtatatctttattaaccaatgcatgtcttaatccattagctgtctctagattcttacctgtaaatttttcatcttcaatctttaactctttgtaaagattcttaatatgttcagttgccttatcaattgttaaatcttttaattccatataaattggatctgtttcattgaaaaataaagttttcttaactgtaccttcacctgtttgtgcaatataagaatatttagcacttggatccacatccctctcaatttcaacatcatctagtaaatcaaaaatttgtgatctatagtattggtaatggcaaacaggaccaaacatatccatagtacgatctgttatcaaaaaaactgttttactatttattggtataatatcgggatgttctctataatatttatcaagtttttcttgaaacctgtgtgctagttctttagaaactttagaattgtaatatcgaacaattggatattcattagtcaatgtacaaagccccatcattgaatttagagctgtatcaatttgatattgataataatttttaccatgtttcattgaattgtaataaactggaattgaatggaaattacctgtaacaaaaactcttggttctaatgggacaaaacttaaataatcaacaatatgaggtgttttttgcattaataatgaatttgaaaaattcttattagttgttaaatctttccaaaaaagttcataaggtcccggcataaacataacaactgtatctttatatctttgaccattactaaaatcagctgctagacaatttattgaaaagtttctagttggatcaagtaaatataatgcagaatccctattctttgatctttcaccatctatttttttacaagtataaacataatttaaaacatcatcattaaataatttttcaattattggatatgtagtatcatcaacaattaaatgacgatgtgaagcacgaaatttctttaaatcggctataaatgcattcttctgcacttcaaatagagacattgatgtttttccttgtacactggtagatttgcagatatatagaatgaattatcaactaacaatcaaagaaaaaacccgtatttatgtatacgatgcaacatgttgttctgttgactgtctgtggtagattgattaatccgaggattttatgggaaattttggttatctgattaggtaatgcagaaaggtgtagaaacacttttacttcatgttactatggtacatacactatatgataacagtgcttttaaagaacataaatggattgaattaaatttatataagtgtaaagaaagtaaatattaaaaagtaaagggtaaaaatatttaataaaactgtgtatagcgtctggaatcttcatgaactggcatttcaacctttaattgatttaattcattcttaatttccattgcagtttgaggtgtcagattattacatgttgcagaatctggtttacgatcataatcatcctcattataagtatcatataataaaattcttgatgaaaatttaacacttggtttctcaatatgttgtggtataatattttcaaacatactaccaaatgaaattgatgttctatttttctttttggttaaccttttaggtttctcatctgctttaattgtactatatgtgggaagtgaagctgttgaattattattaccaaattttgtatgagtgttaccaattgatttattcaagaaattcaatgattttcttttattagctttatcattattatatgcattattctcatattgataactatcgttattttgcatatccgcttggaattgatcatagttgccatagtcataaccaataacttgttcatcaatttcatcaacatcatcatatgattgggtgtaatcattgaatggattgttcaatgaatatttattattactttgaacaggtgatgcttgtgggctattgtaataattagcatattcgctatatggagtataatcatcatctagtaattcgttgttttcataaccagtatcatctcttagttgactattaacagaattaaattgtgcaatataagatagggagttttcagaatctgaaggttcaattgaatgaataggattttgctttgaaagagaaccaattatagctgattttgtttctggtttcaataatgaattaaatgatgggccacttaaacctttttgtaaatcactagtgatattatcatttaaattagatgcactatcaatgattggtaaactttgagtactataattgatatcattttgcaagttttcctccttttcaattaaattttcaatgctttcattttctttaaatggtgaattagaaagttttggaggttgatatggtgaattaaaaatacttgcatttgaagcttgtaaattagttaagtcaaaatcatcaaaattcattgaaccataacttgtattaatacccaagaaatcaggaacacttgattctcttttaatattacgcaatggacttaatttaacttccattgctgtatcaatatggaaacttgaatttaaatcatcattatcatcatcaaaattaatcatatcaataaattcattaaggtcatcctcgattgtcatcattgaaattcttttatcattttgaacagtattattagattcaactttcttcattggagaatgaacaatgttcgaagtaatcgatggtttagctgagtgttttaaaatactagatttcctacttacaccattattattcttacttaatattgaggcttgatcaaacattggacttctaacaacgaccataccatcaggtaaaaccatctcatcaaattcctcgttttggttttgaaccattctaagaattgaatttgaattattattaattttattagaaactgatctaattgatttaattgaccttgatctttccaaacttacaattgattcaatttcatcaatactaaactttttaggaaacatatcatcaccaatatgatatttatttggacttgcagtaaatgatgcaacaactgatactgatggactagttgcttgtcttggtgttttcaaaatatatctatcatcatcgttagaaataactgaattacggaatgtagaaattgatggtggtctttcaaatggaatattttgaattcccaatgcatgtggtggttcgaatctattctggaaatcattaaaattttcgtattccatttcattttgatcttcaacttcattttcaaaatgggtggtatcaatatgcaatggttcttctccacttgtgtcatatgtactagaactattaataataaccgagccatttgtatcatcattggcatttggttgggtattttcaataacgggtgaagcaacataatcactattctcatattggttgttaatgattggagtggtttgagcaaattttgcagattgtggttcaggaagttcaattggtgaatgagaagtttcaatagtttgtttactttcagatttacgaatagttggattttgattccatgaaggattaacattttgagtaagtacgggttcttgtgtaaatactggactttgatttgattttggcgattgattatcaaaaccaaatttttccatcagtaatgcattatcatttgatttggtgtttgtttcaggtggtggtaaggttggtaattgtttgttgaataaatcaggtgatgagtttgaatgtttatgagatttttcgatgaacggtgcttttggtggatttaatatggtattggtttgatttaataatggtaaactagaaacacttgaagacttgttatgtttagttgctggagattttggtgtattcgtatttaattggtcatttaaaacagttgagggactaggtttgttgttattgttcgaaaatccaaaactttttctcttccaaccagacagtaaagacttggatttctcttttctttcttccttttgtgtaacattcttcttcttattttctgaggtagtgaagttaaatgattttggacgtgaggagaatttttcattatttggtagtaatggagatttcctatcttttttgtttgagttgttactatcggattttttcgaaaataaactcttgaaagttaactttggtttaggagcaggtttagaatcaaattgagttgatggagattgaggttgagtgaatcggctttgatttttagatttaggagataaatttatgaaagttttctttacttgttgtgttggagaatttttgattttttcaaaagttggtgaagtgtttctaattggagatttatttaaaactggagaatcgtacaaacttctatgagggctattagataatacagtttctttatgtgttaaatctgggacagtttttaaatttggagtggtgttgttattagaaaattcaaattgatttatattactgaaagttggagtggagttggtaaatggagtattagcatcattttcatcatctatcattctaattgagtctcttgattgatgtttttgaataaaagttgagcttgaaacagatctagttgacataggttgagcagattggttattattattattgtttttgttaatgttattattattatccttatcattaacggtaccatttctacttggtaagaaactaaaattttcattatctgattcttcttgatcatcttgatcatattcatcatattcatcatagtttgtatcatcataaccaatttcatgtacagaatctgtagcgatggataatttagataatgatttactgattgaagggtttataagattgaaactttgaataggttcattataacccattgcaggtgaattaaaatcattaaaattaaaattatcgctcatcattgataatctattagaaattcttttatttgaattatttaatgtattattttttgtattattttgggagtcatcattaatagttgatgatgttttatcatgtaatggggaataagattcataaatatcactgtaattcattccatttgatttaattgaatttttaactggtgtaaaatttctattttcaacaactggactatttaaatctattaaatctttatttgtattaatgctaagggtatcatttgaattgttaaaagttttagcattgagggttggatttggtgaataaatatcatcaataagtgaatgaatgattggtttgttgctatcattttgagtttttgtatcaatgttttgatatgtttgagttgatttattatcatgaggataagcattatcataattttcatcgtcattaaagtcattataatcttcaaattctgttaattcttctgtaattgtagtatttgttaatgagtgaggtaatttaagtggtaaagtagagctagaatttgaattaactttatttgttaaaatatcacttaaagctctaatacttggacttataaccataccaatatttatagttggttcttcagttgtagtattttgaaaagaaaattcatcgatatttaaatcacttgttttctcttcatcattttctgaatctttagtagtaattgaattaaatgagggagagatgactaaagatttcctaaatctattagcatgatttttagtagtatgagaattaattgcaggaccagagtaaaatgaatttgatgaaaatctaggttcctttatattattattatgagttatattgttgtttaatctttgaggtgaagctgtactagtttgagctgatgaataagtatcaatatttttattatcgaaaacatcatttagagaattcatggaagcagagtcttgagtgataggagattctagtggtaaagaggatataggtgctgactggagcaaagatgaagttctgttggacagcatatacggtgtgttgctggcctaaatgaagtgctatgtgaaagcaaattaaaccaaagccaatataaaagataaaaaatgataaaaaacgatagattaataatgtactatcaaagtcaacaattaaaacgccaaacacgctttttctcagaaactcccctctgagagagacatgttgattatgtaatatactaaacgcttatgacgcgtaacgaaaaaatttaattttaattactgcctatttgggaaataattggtgtattattgcccttattttggtatgacactgtatttgttgtgatggatggtatttaaagtgtttatttggtagtattggacatttcaatgggtgaaattattactggtgcttaagttgacattgagttcactataaaaactatttttgtagcatttaattaacttataaatagaaagtaattttatttaaagaaaaaaatctaaattgaatgggaattataaaaaataatatccccgttaaaaactaaaattctattaaaatcttaaagtttgcttatttatgtcctttagagcagcaaaatgaacgggtttccagcacagtctactccaagtaaaggtgaatttggtcatgatatctctaatactatgcaaaacttaatgcaaaatttagaaattgaagatcaaaaatttaaacaatataaagtacctaataataattcaattaatgatattgaatttagaagtaaaacaagacctttatttgctaaagaagaaagtgataaaagtagtagcgtttacagtaaaagtaatagtaatgataatgataataatagtaaaactaacagtaacaaaagttctcaaaagagtagcagaattaaaaacagagctacctgtaccaatagagtaataatacaactaatgatgcagatgatgagaaagattcaatgtcattaaacagatccaatgcttcatcttctaatatgccattacaattagatattgaaaaattacaaataccacaaagatcttcatatgttccagaaaatacaataaaacaattattgaatcaacttaaacttaaagaagaagagctacaacgaagtcaagaggctgcacaaattatgtatgtagcaattatcatctgccaatgtaaatgctaatgtaaatagtggtagtattgaacaagaattcaaaaatcaaaaaattaaccttttaaatgaagagcattcaaatagaattttaaattatgttgataacattcaaaagttacaatgtgaagtttatcaatctgagttaaaagacttgaaggaagcaattaagttccaaagaagatgattacaatgaattattagctaattataatcaattagaggtttggactttagctttgtttaaagaagttggtgaacgttcacaaacttggactaatatggaatttcaattatccgttgctgatcttcgtagatatatgaaacccccacttaaacgatcaaatcttcaacatttatatcgttatcttgtacagaatcttatacatcgaagacgattatgaagaagaagaagaagagtataagtaataatttttcaaacagaacacgatattttttttagatctattctttaacttttccaatctgaaaattcaaaactgttttgtagataaccttacttcttttattggcctttgcaaatatatacctatttatagaataataataaaatcaagatacaacaaatgtctaaaagatcggctgactcagataatgaacttgaaacaggaaattatagctataatgattcaacatcttccattagaagtttacgaataaagacatcatcaagcattaaccagagtaaatatgaatcatatcttaacaatctggcacatttatcagatcctgtgtataatcaactagtgaataccattgaaacaattgctaattataagggtataataatagattctgcatcaattgatcgtatagcagtagaatcaatacgtgaattcccaagttcaacggatcaaataccaatattaaaatatcgaaatcaattaattgaaataccattatttaataataaagatgattttacaattaattataattctaatttcccatttttaagagaacctaattctattaatgtcggttttactaattttttacaaaatttgaataattataaacattttaataaagttatattaaaggaagtacaaataatacctgacttatcaacatttaatatggtttataatccaaagtataggggatttttcattagaatttgagtctttcctgaaatcaattaataatgatggtaattttataagatgtagtatgaatgatggaattttgttgaattcaaatatcatgttacattttaaaaatgtttggttgatgtcctttcttttagtaaatagagattcatcattacacaattttgcaaagaaggaaattttaacaaagttatggagtaatgtatcaaaatgtttcgaattaatgaaagatattcaaattgccgttagtttgaattacttaaataatgaatattcaattgaattacttgaaattctacattgttattatacataagtctatataattgaaaataataaaacattctaacgttttagcttttctttgttaatcacataattgtacaatcttctttagtatttcttgatttctttaatctattaatatttttatgtgcaacttgaggaatgtatgaaggtttactgttgaaggaattacttgaattaacggatggatcatatttagtgtatccagtttgatttgttgaagttttggaaattgatgctttcttattatcaatatttgatgatgcagctgtaaaattacttgttaaatccgataattgtttactaaatgatgcactgtcatttacaactgcattatcaatttcattttcattatcattttcatcatcattttcatcaattttatcaatttgttcatcatgcgtttgtgtttgatgtttattaggatgtatattatattcaataaccggatcaataccaccttgaagaattgaatttgctaagaaacaatataatttaatccaagcttcttcaagttctaatgggaatgattcaggactattaccaaaccaatcttgaaatgttttaattaatgcttcacccattgttttaaaatatggtgaatcaatacctaaaattcttgcatgtaaatgacctaaattcaataatgattccttcatttttgataaatcttctaatgatccaattgcaacagatataacacctgcaaatgctgatgcttgatgtttaatacttggaattaatgtttcaatttcaggatccataccaattaaattattgtaaaattgaatacagaaaaggaaatgatgcaaatgatgctgtgttgaatccttgattagcctttggaattggtgcagtatttattatattattatcatttttgatattgccagaattattattattattattgttactattattgttaactgcactactaccagtagatgaattagtgacagttgatgatactttaagacccattgaagaagttcttgaaagtggttcaagtgcaattgaatcagatgcacgagattctgttgatgtaacaatagcccatgattttcttaaaagttcaatttcagaaggttttaaatgaagtgatactttataacgtttacgacttacaacaaatgaatttggcatccaatgaccttcaaatgttgtattaattgttgatgtagaatttatggaagttgctgtaatacttcgagaaagaacagagagtgtttctgttgatccataacgatgaagcattgtaggagatcctggggtctgtgtagatgcagtttgtggggtatcagagttgtgtttgtggaacattattaccggatgtgtatcagtgaatggacctaatgattccaagaagaagatttaggtggagtacattaacaaaaattctggctttgatgttcactaaagttaatttttcgttgagatgcttaatttatgtctgggcattaaggaaccattatttattagtaaaatacattttattacacttattatatgtacaattatatactgtaaactatagcttatatattagcccacgatcccccacagatacagattctttggtaatgttggaaaacaggattagcaacaaatgccatactgtttggaataaacattacctcatcatggatgacagatattgcaccacaacgtatacattttcttaatgatgatgtatctcttggattacccgcttcatcaaccgcatttgaatgtcccatcattgcttcctcaggtgtcagccattctttacgtaaattatcaataattcctccatctttaatgtttttctttaacaatttcttaaataccctacgactacgtttgatatcagttttttcaaggaatattgattctgaatgacgtttactcttcttctcaacagatggtgatttatctacttttgtactttcgctttcggtatcgtgtgattccatatcaatatcttcatcaactatatcattttcgtttttgatttccactgcagtatttatttcatgattattaaaattgtcatcatcaacaacagacatatcatattcaaaattattctcatcaccttcataatcttcatcatctccatcatcttcctcttcaacaatgtcatccaatcctaaccatgaagtattataaaaatataaatcagacacttttgtattcgaataactcaaaactgatttattgaaaacttcactgattttcctcattgcatcagtaaaatttttagaaacatatccttgacagacaatttgttgttcaacagccaatgacattggtgcatcaagtctcatatttcttaaaggtgtatctgcctctgttaagaatttttcaaatgcaactaatgaaacgggtaatcttctaattaatgatcctaatctataataagcttcaaatgttggtgcaattacaattgctttaccagttttagaattagaaccagatccagatcttccattgccactaaattttctttgtataactgatgaatcatttttcaaataatcttcttcaaccatatcgaatgcacctaatggattatctgatgtgattttagcagttaaatttggatcatttttttcaacgaatttttgaacaaatgaaaataatcttctaatattggcaattgaaaatactaagaatgatcttggaattttacctaaaattaatggaataacaattgaatttttaattaatttttcaattgtctcagtatcattagatttgaatgcactatttaattccatcaattcttgtgataataatacaatataatctaaacaccatcttatcactcccataactgataagatacactcctctctcattttagcattcaggagagtatcagttgcagggaatcctttcctaacaaatctttgcatatttgaataaattgtatgaattgtatacataactgaagatgcaacatatctcaaattaaccaaaaccaaagcaatcttaccactacgtgtttttttccaattatcagaagtacctaatgataattgtaatgttaacaatctctgtaatggttgattttgtaccattttatcagattgttcacttggtatatcaatattcaaattaattgacctatgagattcttgaagtattgataccattaatctataagaataattttcattaatttttttactcaatatcattaaatcatttctaatggttgcaactatatcatcagtaaaataaccaaaataacatgcagttgtatgtcttaatgaaattgcagctgctttagccaataataagccctttttcttaccatttaaataatcttcatcaacattcgaagttgtaagacaatatgattgtaatgaattaccaccaattggtaacacaacatatgaacaaatatttggtgataaacaaacaaatttaggttgttcctttaattttgtaaattcataaccagcatctaacattaatgatatatggtttggtaaatttgttaatgagctggatttatcagaattagcatttttctgctgttgctgttcttgatattctttactaaatttattaacttcttcagacatatcttttcttttaaaaattctaataacaccacttgataatacaaatgcaataaattgatctaaatgaattggttcaattttcagaattaaatcattaatagttaacatttgaatataattacatgaaaatgaagaatgagagaattgagtaacatcaacaccattctttgctgcaatatctttaaaactttgatgaattttcttttgatgatcaacaacgactaattggtaccttaaaacaattgtttgaattggatcagataccattttcctcctattttcaaaactaaataaaatttccatatgagaatcttgttcaaaattaggagatattaaagtaacatcatcaaattcaaaaccttgaactatattattcatatccaattgatgcaatttagtaactaatatttcaggtaaaactttagtatcggcaggagcacgataatttgggttttcggctaacattttagcagctatacttaaataattccatttaatttcaatttcaaaaattttactaactttagataatctataataagcaattattataattttaccattttttaaaaatccaatacttgcatttgtaataacatcatcaagtaaaacagtttcattattatttaaatccacacaaactttttcatactcaattccatgttctgcttgataataaagacaaacttgaccattttgtctaattgcaatacaagcttgcttagttgctaatggatgtgacgcaccataagctttatattgttgagcattatatctataataaaacccatttgcatcatctgatgctgcacccattttagatgcacaaccatttaaaacttgattttctgcatcttgttgaattctaacagctggtatatttgaaataactgatttatctaaattaagccatttaatttctaaaattttattatgtttgggtattggtggtattatattattagcgatattataattatgttcagtaaagaaaacttcacatgtattgaaagaggtacgagagtattgaacttgcattatattttcattaatacctgtagtggctgatagataatcttttggtttattatttttaacacttttaatacccgttactaaaatggtaacattaccttcatcatcagctgtaaataaatcccaacctgtattactgaaggatacaaacgatgttggtggtagtttcctctttgggaatggtagtgaagataaattagcatttgaattagtatttgaattggtattcgagttggtatttgaattattacgattattagtaattcttgaagattgtaataatgaagcaatattgaaaaaagttggtggagccaattgccaattcttaccatcgatacactctaaataagttaatcttaaattaccttcagaacttataaattcatcatcattttcaggatctaaagtgtaagcaatatgaccttgacgagaccaagaaactgaattactcttattccttatctgagaacgttccaataacggcacacagatcttgttatactccatcggtatttatttaaagaagatattctctaaagaaggaagtgaagataacaaaagatcaaacactctctctcttcatggaaaacccactgttaacagaacatgttgtggaaaaaacgcttctaaaattccgacataagattcctgtccttgaaaattccgagatcatgagtaggaggacccttgtttaacttacagcccctctttaataataatgatcaagaagttgatgatttatatgatgttgatgttcttagatagtagacaacatagtatggtagatcttggacaattatgtggttggggttatgcaattacttgggggctagccttttatccaactttattactaaattatagattagagacatcagattcaatttcaactgattatatggtacttaatatactaggttatattgcttattctacaagtatttcattacaaatgtttaatgaaacatgtaagattccaatatatgaaacattttgatggtagaattccaatattgtcaaaagctgatttattttatgcatatcatggattaattttattacttgttttattatcacaaataatttatgggaattccatgtggggatttaaaaatgaacgtaaaagatttaaaattcataaattaagtaaattagttgttatattatttatcatttttgcaatttataattggaaatttgataatgaagtatttgcattcttaaattttgcattaaatttagcttattttaaaattattattagtttgattaaatatattccacaagttttacataattatgaaagaaaatcaatgtatggaatatcaaaattacagataagtttagatttaattggttcgtttttttcattatcagagttcttattaagaaatgatttacctctatttgaggcaattgattcaaatagggggaaattcggtattacagttgttacatttttatttgggacaattttcatgattcaaatatatttatatggtacgacggacaagagggggaaagataatatggaaaaaagtataaatttagtatgattaatcaatcaatcaatcaatcattcgcttgatcaacactttggatatattggaaaataaatgcaataatttgtaaatgtgaatcaaattcaatatattcattaataccatgagaatttgctgtaacacttggtaaaacacctggtctatatctataaatatgatcagttaaattccaataaagtttggtatcagtattaccagtacctaaacctggtgtaacaacaattttagattgatttttttcattatcattattattatcattattatcataaatatcaggatatgctaattcttcataaatatgacgaattgtacctgcaaaaatttcccattttgaatcattaattggagttattggtgatggttctaaagttttaattggtttaatagttaaaacaccattttcagttgatggtaataatgtaataatttcttcattatatgggaattgaacatttaaacctaaatcaaatttatttgcaataatttttgtatcatttaaaaattttttaaatgcaattgtaatattttcctctaaggcaactcttgaattaatttttaattcaacaaattcaggtaatgcattaactttaacaccaccttgaataacatctaatgcttgagttgtcttaattgaataacttgttaatctatctttattaataaaatttctaacatctaaatttgaagtttcatcaaattgtgatttaagtatatcttttttcaatgattgatcaatatcaatagaattttcagctaaacaaacatattgatggaaagttggattataatctgtgaaataagttgggaatttattattttcaatttgaacaattaaatcaccaattataccaattgctgtatgatcttgaggaactgatgaatgaccacctttcttttgaattgaaattgataaatctaaataacctttttcaccagtaccaacaactgccattttagtttcaccaatatccattaatgaaacaccaccttcatccataactgcgtataaagattttttaccgaaaatatcttcaataaatttaccattttgatttcttaaacctaaaatttcttcatcaaaaccataagaaaagatgattgatcttgttggtttaaaatttaatttaataagttcttcaactgcttcaaaatgtccaataagtaaatttttacaatcacctgtacctctaccatataaatatttaccatcataatgaccttcaaatggtgggaattcccattgatctaatgaatcttcattaattggaacaacatcttgatgagccattaataataaaggttgaagtgaaggatctgaaccttcccaaatataaaccaaaccaaaatgattaactttatgtaattttaagttttcatgaaagagagggaattcattttgtaaataattatggaaaatattaaaattttcaaatacttctaaatttgaaccaacatcaagtgggaaatcatcataacttgaagtatcaatttgaactgccttttgcattcttgtaactgataaatttctaaatgattcatcattaataattttatccaaagtatccttaaaagtttgattttgataagattcaggagtgaatctttcaacttcaggacattttggatatttatcagaatcaatatctactgtagtggttgtagataaagaagatgataaagaagatgtattaattgcacaattataggataaataagctaaaactgataaaattgataatagtgagaaaatacttaaagtgtatctacccattggaggtgtgttttttttcattgtttaaacaagtggagataggaaaaagagattagtcaatgatgtactatcaaaaaaaaagaaagaaaagtaagtttcaagcaagttatttaaataaaaatataaaattgaaaaatatatcaaattgaaaattatatcaatgttaaaaccgctgcggtcgatataaaattaatagttgtatattccgataagctgataagaaatgtaggggaattgaaaaattagaaaaatgttgatgcttatgtaatcattatattaaagacaatagacgcatcgaccattacccactattttattttattttattttattttattttattaagagggttccccagtttaagtttttcagtgttatatagggtgtgaaatacttctatttctttagtaatggttggttgttatgatggtataccaatagttacagtatagatacagtatttacatttattatcactctcttactaactatattccgctggaaaggtaaatttactagataatttgattgatttttcagattttttttttgcaccccctctttcttaagatattaaataagttcataaaaaaagatcaaggttaagattagaattaacattaattttaaatcatctttattaaaaatgcaacctgaacatatacccacatcatcatcttataccatatcatctaatattaataaatctttaccaaatgttcatccaactaattctcttattttagctgatggtaaaatttttaaagtacaaaaaaaacgtcaaaggaaaatttatagttgtataccttgtcatcaaaggaaaattaaatgttcaagagaattaccaacttgtcataattgtttaaaattatctgaaaaaaatccaaaggagaaagatgaaattttatttgcttgtaaatattttgataatgataaaaagaaaaatttaaaaaagaaaggtgttacattaagtaacgaaaatgttattaataatgttaataaatctggtaaattaagtaccggtgaagatatagatggagaatttgatgaaaatgaaaatgaaaatgatgacagtggaacagaaaatgaagaagaaaaaaacgaaaataatcaatctactacaaatcaatttgatgagaatgttcaaaaaactattggcaatggctatccatcaaacgatcaaatttacgatgaaaatttcatctctcaatacaataatgataataatttaaattataatcaaaatattaatgtaaagggaaatgaaagtatagaatttaatttagatcccaatgattttgtttatataccccgtgatgatacaattattgataacggtaatactaattcaacaacaaattcaaacatagatcaacaaaattccaattcaaattcaacttataatattaatcgtaacccttcaatcaatacagatgatgaactaaatgattcaataataaatcctgaaattcaaatttattctcattatagtaaacaatttgcttcacaatttataccaattctgaataatttaccaacaaagcaaagatctgatgaattattagaaaattttcaaaaaaatattcattcccttttaccaattttagatatgcaaaattttttagaaaaatataatgaattttggtattgtggtttattccttactgataatattaaaaaattatatcaatatactgtttattttaattgtagagatgatgaaaaattaccaagaaaaatatcagatttcctttattggtataataaaacaaatactacatttaaatccttcaaatataaatgaatttttaattttattatttgcagtttattatacctcagtttcaagttcagtttatgaatttttatctaaaaaatatgataattttaataatattttatcatataaaaatgaagttaataaatattataatacttataagaaaatgaatcataaaggtttaaataatccaagagttatgtcacttgcagttttacaaataaatgtattagttcaatcattaactaatttaaaagctggtaaatcattaatcaatatatccaaaattttaagaatttgtcaattttatcaattaaatagagatcctgttctttatcatgcattaaaagatgttgaattagttagagctagaagaattgtttggtggcaaatattcttattagataatctagtctcattcttcttaaatcttacacctttgattaaaacaagtgattttgatacaactttattaattgaatcatcagataaattacccaatatcaatgattttgaaaaatcagatccaaattcaaatataaacactagattctcaattatgtatttgaattgtatgtttagatttactctaatagtcgatgatttaaattgtctcaccaatggactcaatgttcaattgaaatttgaagatattaataaaatgaaaaataatatcaataatctattcatcaattgttcttcaactatgaaaaaaatgagtagtttattttatgagatttatagaaatgatatgaataataatgataatgaatctcttgatattaattcaaatgcaaccgaaagtacaaatggtaatgttaatcatggtacttataataatttacaacaactatatggaaataatgataatagtaccaataatgataataataatagtgattataacaaacctggtagcaccagtccaaataatgatactgatcattttaaccagtttttgaactcaaatccaaacttacaaggtcataataattatggaacattacccgattgctttcgatttttcatgaatttcttaaacattttaagtgataaaatgttaattatgttacaaaagaaaataatattaaatccttatattgttgatgatgattatagaaataactcaaatttgaacttatcattaaaaaatcatgaatataattatacggatttacaaaataatttattaccttcattaattcattatttagatacatttttattactttctaagaaagatatgttaaaattcaactggattttaaaaaattatataccaattgatgaactaatattattaatgcaaattttagcaacaaatttcaaatcagggatgtcacaatatgaaaatagtcctataattgatattaatttgaaaatttatttaattgatcaaaccatcaattcattgaagttaaattggcataaaaaactttcaagtgttaataaattaatttcattagcatcaaatttatgggaattaatgattctaaaatatagtattaatttatcattatcttattcaatgtttaaaaatttcatatttcctaaaccggtttttgaatttaaccattcaataacatcaaatgcacatccaacacaaaattcctcaaattatagaagtacaaatactatgaacgatgatattagcaataataaaaataacaacaatagttttcatcaacaaaattactatcatactccaacttcaattaattgtgccgaaattgcaccaagagcaattggaatcgcatcagcatcagatactccatataatagaaatcaaagtaaacaatctaattttgattttggacatcgtgcaatattcaatagaatcaacacatcaggtgaaattaatagcccaaatgataataataatgataacaatactaatatcaaggaaaaatttatagaaattgctaaattagttgaaaatgaactattaagggaaaataacagtggaccaattcaagaaactgatgataacgaagaaggttggcaaaatttaggtacagaggaggaatctggattaaattcaattgatgatttccatttttacaaaaacttaaaatctgatgtcattagactattcagattagttattggatcatgaatcaaatatataccaagaagcaaaagcaataacactaatcaaattattttatagattcattatatagattacaattttgtatacacttaaaaacaataataaccagctaacaccataataatcattgctacagtgataccgtatgaataaacaatgtctttggtattttgaaaacttatcttaataacgttacttatgttttcactttctttatgttgtaaagtggtggtatttgggtttttaattattttgttttctgattttgggtaatcttcctcatcaccatcataaacatagagataatcttcatttggttcaacaataacactttgttgaatatttgcaaagaaatcagtaagtaaaacatctttcggatccctattgtataaatctgtattaacaccaacatttgaatgaattttatcaaatgtataagaatcaaataaattttgaagtgttaaattcgaagtagttgtaacattttcaaggaattctaatgtataataagtaaatctatcaataactgcaacaccaatttcaacatctgaatgatgagaatatgaagattcatgaatttcacttgaaccacaagagattatatttggtgaataaaattgtgaatacattgtatttgcttgacaagtatcaatcataaagaaaatttcattatatcttttcttttcatacatttgagcaaatgcatctgcaatatcatgacttgaaatttcttctgcatcttgaaactttaaaaattcatcaccaccatgacctgtaagataaatgaagatatttgaattttcatcagttaataatcttttactctttggatgttcgtttggccatctatctgttaataatctaataaaattttcaactgtaacttcatatcctctataatcaacttttatattatctccatataattcaatttgtctatctgcattattgaaaacttcaccttgaaatgcatttcttggattacatgcaatatcatcacttaacattaaaataatttgtgaatctggtatacctaatcttttcacttgactatacattgataatgcatttgccatatgtctgtaattaaaccaaaatcttgaagttgatataataactgcccaattatttgtatgttgtgattgttgtgtttctgctttattttcagtaattacactttcttgtgcaaatactgccagcaccattgacaagaagagcaatatacacctactgaatttcattttgatgttgttccttgatgaattacaaagaaaccaatgtttatcaaaaagaaaaagaaacagatccgtgctgtcattaggtagtaaataaaaaaattcatgtctactgtgatgcatgcattattatactgaatttgattacaaatcaataattctgaaggttatcgtgacataaatgcatatctgttaaatataaatatgttattatcgttatatagacagagatactttcatttgagtaagttcagggggtttaaaggacaattttttgatgttgttaagaatcagatacacatttcacctcgtatacgacagtatgccactgaaaaattaactactgaagatgatgaaataattacaaatggcattcaactacgacaataccaacaagaatgcatagattctattataacagagttatctgaaggtcataaaaataaattagccatttctattgcaactggtggtggtaaaaccgttgttttcactacatgtatacctgaattaatgaaattgaaaagatttgaaaatgataatgccaacggtgttttgatattggttcatagacgtgaattagcaactcaaactatagctacgattcagagatttaatattgttgatgatgatagaatttttttagatatggggcagaataaactaaattctgatatatttaaagatgatagaccttttattatagttgggagtgttcctactttgtccaggaatgaatgtagtaggatggatgaatatgatgtgaataaattcaaggcagttattgttgatgaatgtcaccatgccgtgagtgctagttacatgaaaattttcaataagatgaattgttctagagaagataagactaattattcaccttacttacttggattcactgcaacactgggaagaaccgataaaataccgttaagaaaagtgtttgagaagattgttttccaaaagaatatagcttccttgattgatgaaaaccatttatgtgattttgattggttgaaagttgagataggacttaatctaagtgatgttgaaattaagggtggtgatttcaaacttgactcattagccaaacatgttaatactgaaaaaattaatattattgcattaaagacttatttgaaatttttaaaacaatatcctaacaatttcaaatcattgttggtattttgtgttaatattaaacatatgcaagatttatctgccttgttcagagccaatggtataaatgctcaatatgttagtggtgaaactaaaacgaaggaaagagatagtattgttaaagatttcaaagcaggaaaaattaacgtattgtttaattgtggtgttttcaccgaaggtacagatatccctaacattgattcaatttttcttttaagaccaaccaaatcaaaacaattacttattcaaatggttggaagagggttaagactacacgatgagaaggaaaagttaattgtcactgattttgttgatagtaaatcattaggtttgacaataacttctacactaggtggtaagccagatgttattagtttaatcggttcattatgtaatcctggatttcaacataatgatgctatgttacccggtgacgttgaatatattcagttcaaaaattataagggaattcaaatgcttgaagaatctgcaggtcctaaacaatctatgccgttcttattgttgaaaaacatgaaatggttgaataaacgagggatattaaatcaatggacacaagttaaatttgatgcttgggctacaccatgtggatatcgtgcatatttgaaaatagagttagataaatctaaatttgttgctaaatattattattcaaaacttcaagcgtttagtacgaataaaaagttgatatgtaccacaatgtcagaagatgaagattttgataaagtagtaaatggtatagtcacatttattgaaaagcacccatcgattggagaagagatgagatcaactgcaaaaatggaactttctaaggaaagcaagaaagctacacttaaacagcaaatttttttgaagaatacaatattgccaatagtgagaaataccatgtcagatgcattagactatgacaaatttcttgatgttttcaatgtacgtttacgggaaatgacattacaggatgcatcaaatctaatttttgggtatacagtatctcgttcacaatctgttttactttggctaaagcaaaatttcctgaaaaataacgaacagagaagattgattacacgtagttcgattttaaatgaaagagaaaatttgcaaaaggaaggttggattgattgatcaaaactattatataaaactgtattattattatattgttatataaaagttataacggagaaaagcagtttataaaactttgcatgcaaatcaaaccgaatttccatccgctaaatgtgatgatttaaacgtatgtgaaccagctcaaccagattcaatagaaaaagaaagtttaacaaatttatttagttcaaaacaattggaaatgaatccagaagcaacaacacctactactgaaactttaatcaatgaaaacacatcaatagctcaacgaactaaatcgaagaaaccaaaggctattgtatatgatgattccattttgagtagaactaagaagggtgttggtaaaaagaatactaaaaagaaaaatacaattgtgaaaaatcttgagaagttgcttcaaagtattccttcaaattctgaaaattcaaatccaaaacctgttgaagaagagattgctactgtttccccaaagaaaagtctcgacaaaacttcaacaaaaacaaaaaggaaagacaaagtccaaaataagtcaaccattggtgtagatacaacatctgttaggcaaactagatctaaaactagatcacttgaatgtaataaaactattcaaaatgaaggtaagcaagacctggcatcccgagcctatatatgttgataaaaatgatccaattttaaagaagaccatttccacaagatgggttttcaacatcaaaggtgacggatcatataaggcaaggttagttgctagaggtgatatgcagtctgattcaacttacaatgaaacttattcgcctataatgagagcagaaattgcttgaactatactagcacagaatgcatcttccaaatggtattttaaacaatttgattttataactgcttacccaaacagtttcctagatactgatatctatatctatcctccacaaggatatgctaaaaatcacaaaaaatatgaaaataagagggtggtttataaactcaacagaggtttatatggattaaaacaggcaggaagattatggcatgctgaaatttcaaaaaccttaaaatctttaggatatgagaagaatgatattttcccatcaactttcgtgaaaaaggaaaatagtaaagtttattcatttggttttgcgttgcccggagttgaaatatgtcaacaatcaaggtgataaagttatttacgatttggtagataaaattatcaaaagatgcatgccagaagatgagcatttgataggtctggttgaatcatgaatgatgcataaatgcagacttgatcgatagtaatggttcagacccaaaaaactgtaaaaaagggggttttccaagaccaaagtgtccttttttcagaaagacagctagtggtagaattataccgccaggaggtgaaggtgatgaaaacattgtttcatataatccaatttgactgaaaaagtatagatgtcatgtaaacttagatctggttggttcagcagttgtaaaatatttgttcaaatacatggctaaaggagttgatactcttggtatgagaagagtgcatgttgtgaatgatggtacagaaaatacattacctcgtgatgaaatcaaggaatttattcaaagtagatatatgagtggaatccagggaaccacctatacttgctcttcatacacatactgaaactgggttttctataagatatgaccaaagagaaaatcccactcctgaagaaattattgagagacaagaaagtgatgaagcaaaaaccagcacacttttgggttttttccgtttggtgggtcaaattgaaaattatgttgaatatgaattcaatggaaacagggatgcagatatggtaagaactttcactatcaacaaaaacaaaaaactaaaaaagtttttttgaaaatattgatgaagcgactttgagaacaccgtttttgtataaagatatcaacaatatattcaaatgggacctaagcaaaaatgaatgggttgcacgtattagaaaatctgatgctttaactgttcagttttagctccatatagtaaaatacttgtatatgttctttcaccgaatttattagggattcgaaattaacacaaccaacaagtgaactttgtaatttaacaacatctaccgagtgtgcagtgacctccaccaacaaaaggaatggtagggacggagatagtcgttaatgactacttacaccttgtatcagctgtaagttgagtgtaaacctaataaaagaaagaagatataaaaatatataagaagaatggaaactatatatatatacgaccaacaaaatatcgtccactaaatttatacgtaaagattttattagcgagagagagaagacggtaaatgattacatgttccgaatgtttagcattttatccttacgccgctttattgttacagtggctgtgattgagtatttgcttttatatcagatttgggagcaatatataataacaatgtctgggaaacactccactgttgtaaactttatattgtctaaggactttcatgaattagttaatctccgaatagattcattaagaggtatatcaactttacaactttacaataagatttacccacaaaataacaaacaatcaacacgtacagattacaccgatcttttgattgaaaatagaatacaagatactattagtgaaactgaaatttttacagaaattcatgtagagtccggaattgggaaacaattgactacaccaataattattggattatctggtaaattaagcggtcgcagatgtaaaataaatcatcttaatgatggtgccaataatcaattgagctttggagattatgaaattattaacttctatgtttttgaaggtggtatatcgaacaacattaatgtgaattcatcagtatcaatctcttccctatcagttgctggatcactatcgttacacaaagaaaataaagatagtctaaatagttggataacactaccaattgaatactcaaaacttccaatcgatgcaaatattgtattttctaattggtgctttaatatagagacaaatgaaaaaattttattgaattccggtcgaatacaaatgtttgataaaaattgcactctattaaagggaagaattaatgtgaaattacaagatgataacacagaatcaattgataatggaaaaaataaacagaaaaatccaaaagatagaaagaacgaaataaaatcagtagacgagatcttgactttgatttcaaatgacagtgaacgacctgaatggttgaatagattgactatttcaaaattagatgaatcagaaaataatggtttatttaacattaatacaaccatttcccagacagagattatcatagaattcagagattataatgtgcccgttgtattttccgatatcaaatatgttcctattgcaatacccaaatacgacttgactgtttcagtttccaattatgatccaagttttaatgaagtcaaatatctcaactttgaaggctccattgaagataatatatctcatttatactcaaacactaaatgcccctttgatcccgatcaaatcagggatgaattaatggaagatccaatcgaacaaaaattccgtaaattagaacgtatgcaacatatttcaccagttgatagagatttgaagccaactctaagaatgaggcaatcattaaatgaaattttgaaaaagcaattttttgaaaaaatgtcatcaaaggaacgtaatgttgtttggagatatcgttggtttatcttaaatactgccataataggtaatattggaattagtaattccatcataaactttattaaatgtgttgattggaataacgttaatgaagtcaaagaattcgaaaatattttacaaactattactaatgcaatatctagttcaactcatgataactcatcaaaaacaatcaattcaccatttaagttgttcattgaacaattacaattagttgattgtttagaacttttgagttctaattttagaaatgcgacagttagaaatatggctataaagcgtttacattcagcaagtaatgctgaattgtctattttcatggttcaattagtgcaaaatattaaaaatgaactttatgttgaaaagaagcctaataatccaaaccaagtttcatatagagctgaaaatagaccagatgttgatgaagaagaaggtgatttacaaatacgatctaaggatatttcaacatctactcatactatgtcctcaagtgaataccatattgttggtaatgatgattatgaaaatgaatctggtgttgatagtgaaattacagattttatggacatcttattatttaaaaatagcaagaagaataggatggatgtggctgatattggatccgagttcataaatttcatgattgatagatgtatcaaagatagttcgttaactaactacttctattggtgtttgaaagttgaatttgaagaagaagcttcaaggaatagggtatcaacaggcaatgaaacccagatagattttcagaaaactattaatgcaaatgatagtagtaatagaactgcaagcaataatgatagctctgataagataaacaatatgggatttaaagggtcaaccgacaaaaataataatatctatgctatgacaatgaaaatgtttcttatcagattgttcaaaagtgaacacggtaaggagaaactttttgagcttcgaagacaaattgaattagttaataaattacatagattctgctactctattaaggttttacacagaaaagagaccactcctatgaaattggagattttgaagaatttattaagagaaaagcagaagagaagtatttttggtactaaatttgattccaggaatatatcatttgatgactctaaacatgaatatttggtagagttccccaagatagctattccattagatcctactgttcttgtaaatggtgtttttcctgatgaatctgccgtttttaaatccagtttgaatccattgaaaattacttttaaaacaacacaaggtgagaagtatccaattatgtataaaataggagatgacctgcgtcaagatcagtttgtcactcaaatcataacattaatggaaaaaattcttgaaagtgaaaacatggatctaagattaaagccgtataaaattttagctacgggtaaagttgaaggattcatacaatttataccaaacagttctctatcacatattctttccaagtataataactctattttattatatttacaaactttcagtcctgatccagatgctcacttaggcgtttcccctaaagtcatggataattatgtcagatcatgtgccggttattgtgtggttacgtatattttgggtgttggtgatagacatttggagaatcttttattgtcaaaggatggtcattttttccatgctgattttggttatattttaggacaagatccaaaaccatttccacctcttatgaaattacctatacagatcattgaaggaatgggtggatccgatgacataaactacaaagctttctgtcaatactgttttattacatatattacattaagaaagaactcatccctgattttgaatcttgttcagttgatgataaatacatcaattccggcattaagaacgagtctcgaaaatagtgaagctgagaaaatggaattattatggaaagtgaaggagaaattcatgttagatatgacagatgaggaagcagttttgcatttccaaaatcttatagattccagtgtcaatgcagtgcttcctgttgttattgaccgtctccacaacttagctcaatactggagatcatgaattgtaaagttgagcccccttctctcacgcgagcgataacacccgtcttcaattttaagatgacacattttacagtttgatttgccactctgtatattactctttctataatttttgtatagtatatctttctgtagtaagaaactcatttttttgctagtaggaacaatggacgaagatattatacccactagggtgcaaaaagaaactttagcaactttgttgaagaaaatattcagcaaaagtaagtctgcacatcttttaaggtacgattcaggatcaaatgagatcaaacttaggatagataagttaagtcttggtattgtttgtttggaggctccatacattttattacccaattatgatttaatcaatttggtagaaaagggtaaatgttgcagttactgtggtgcagttttgaaaatatacgataagggtaaaatgaaagatgatggtaataaatctgatagagagaaacaaactgcacaggataaacatgaaagatttgttaatgggttggattgttttacatgcgaggtacgatggtgtgataaacaatgtcagaatcttgactttaagcacaacttattatatcatcgtccttcaaataaaactgcatctcataactttactgctgtagatggttctgaaaaggatacattttattttgaccgttggaaaaaagttgataaaatggttagatcaaacaactgggatttagtttataatacattaatgtgtattttgcacatttattatgatagtaatttgaaagatggttttgagtcattaaaatgttttgattcagatgaaattacagttttagaatcattcattatgagaaaattaaccaacaatgaatcaattgatttgaaaatagtctgggagtcattttctaattgtttcaaacattttgagatggaatatgttcaatttttgaagtacattactattttccaattgaacaactataacggttcaatttatttgattttttcatctatcaaaaaatccaaaactgctgatccaaatttaaaggttgaatattttgatggtaatacaacacatgtgtatgaagagttcagcttaagaacaactgaaacaaagtcaataaaaattttatcagaagaagttattgatgatccaagtgttaaacccatatatacaaacagagcatctggtatagttgataagcaaataattgaaatatcaagttgtgataaaattactaatttagaagaattaattttaccagatcaagattactcaaatcctgttgatgtcgaagatgatgatatcgcatttatctctgacgataatagtgatattgatgttccaaaaatcatccttccagttgtaaaggttaaacaaacatctaacaaattagacgtaaaccatattcccaaaattagaactgcttcatttacttcatccggtgcatcatttggtgaaggaatcattaagtataatcgtgatcaaatcagagaaatgctggaaaatatttcacataatttgatcaatgaagaatctgatgatgaaaatgccattgatgaagtacattcatctactgattctgaatctacagtttctaaaaacattgtttctttagtgaaaaatttgcaagtagcaccaaatacacaaagaaggaaaagtgttaaatttgaagaaactgttgctactatttagcagatattgacatagaataattaaaaaaactaaataaacatttgaaaaatacacttacattacattatatacacatcttatatcctaataaatagaaaaataaaacaaaataacataataaactaaatgtactcccttattgactgatataagttaatgtatgctttagcaaagttactctcaattccaaacctagtgggttgtttaaacgtgacatgcagaataattcccagtattcctaccccagctgatattttgagtaatgatatcatattatttttatttcttttaatcaatgcaccatgttttttctttcgtaattgtttcatttcatatctgtgatactcatcagcaagactctggaaaacagtcaatgagcccgatgtacatttaagaaaagagtttttgtaaatatgtttgaaagatttcaaaatactcatgggcacggacttccttaagttaagtgataattgtattattttgtaaacttcatgtttcgaatcaattgagttgatactcagatttttcttaataaattttgatagtaccgaatgaacaatatcaacatcaaaatcaaaatttatttcaccactggaatcacagatttctgtcaaatccataataatatcttctttatagtatattaaaagtgcagcatatagatatattggtagttgaggatcatcagtttagaaaaatggaatcccaaattattgatacgtcttgataattttcaatttcatgagtaaataacgatattatactacttaaagcatatattgggttaactctttgaataatcaggtaaaattggaaatctatttgtttcattatatcgggtattaagtttaattgtactattgttggatgtattccggacatcatatgatctcttagatatttcaatgtcaacatgtatagaaatttaaaagatgaacaatcatcactgaaatgtaataaagccatcaatgcaacatcatgatagccttgataataattgctttgtggtatcgccttcaataccaacatgattagtttaaataatcttttcttcaaatcttcaacggattttcccttatgatgatagcaacttgacgtactgtacagtgtattgaatgatctatcgacatctttttgaacttgatctgcatctttatgaaatgtatttggatccaattgcatccaatctattacattctgtttgtatagttcatttagatatgaatcaaggaacggattgattccaagtaatataggccaagctctttccctgatttcatcatttaccaagccttcatcactatatgggtagtttttcaatctaacaatatcattagcatctagaatcatcaataactcatttctgacatcaataccaactgtcattctttcattaaacacttataacctccaacttaaagcccataagcaactatgttcactattgtcatcatgattaaccatgtcccattaacagaaagtgcagttataagagctaaaccaaaaggtcgatgcgacggtgctaatgaagttcaaatcttaatgttaacggctcttaacatgcaataggggtacatgaaaagctcatcaagggttacttcaacatcgacaagtatttccattgatatatgtcacactttggctgggaagtagttggaaagatatcgggaggtcggttttctgatatttataaagtatctaaagccaatgaaagaatatacgcattgaagatagttgatccagacgatttgaaaccaccacatagcattcgtaatgaaatcaaaatactagaagatttagagaatgctaaaaggatcaatggtagggagataatcaatgttgtcagtttgattgatgtgaaaaatacagatatggagtatggtctcttattcccatattatgatatgacattgtataaattgatcaatatcaatatcaagaaacgttcaaaatttaatcctgatgggtcaattgatcgtgttccagtaaataaaatggaattatctcatataaacaaaataattataggtatattacaaggattggaatggatacatagtcaaaatattattcatagggatattaatcctaataatattttattttcagaatctaacttagatgtaccagtcattattgattttggtatctcatatcagggaaatgataataatggacttgaatcatctgataaaaaattcactgatatagcaactggtattttcaaagcacctgaattactattatctaaacgtgattatactaataaagtggatatttgggcagttggtgtaattatgacattattacttagtgataatggtgaatcaccatttgatgatgattccatgcatagtgatttagttttattatcaaatataatttccacattcgggtctcctccatctgattggtcagattgtaagaccttaagttcatttgaatcaatgaacaacactttctttactaaacctgctaaaccattgaatgtaattgtatcctaaattattcaatgaaaaatctaatttcaatgaaaatcttgaaaaagttttcacaagttttgtgtcttatgaatgcaatgatagattaatctgcatctgatgcattgaaaatactactttcctaataattgatattttttcttttctttccagtcattaaagtttcattatgaaacaaatatacaaggtattttttataaaataattaaaataaataaataattgatcgaataagtttagatttagaattgaagtgtcctttctttatttagtgatctttgagttttaacatttctctttcacattctgcaatgaactttactaccaccttcaattttaccactcaaatattgtaatctttccttgaacagtttaggttcaggaacttccttgaatttattaagttcttcaatgaatttccgtatacgatttgtttcaaattcaattttaccaagtagacactctttttcaactgctctataaataactggatcattaaccatcattttaaaagctgattcaaaaactggtttagcaggtacaatttttgttacaacaccatcaacacgaattaatctgactaattctgcattttccatactctgtaaaatttgataactttgtgctttaaacattggtaataagaaaacatcttcataattaatttcaggtttaatacttaataatttaattatttgccatgcgtgtgatatattaaaaccataatcttttttagttgtgaggaaaacttgtgataattgttcaacagcttgttgtgttaatccatcataagcttcctttggagaatcaccagatttcatacgacgaacaaacatttgtaaatctctcatacgaccacctaataatggggtataagttgataattcttcttgaattttttcattttggaattcagggaatttagctaatgcatgattaacaaaaacatttgctgcatttggtgaagcatcagataaaacaactctctttaatggtgatgttggtaatgcagtaattaattcttgaattgatccaatatcatcagtaatgaaaataacatgtgcaatatttaattgaactaaattagctgcccattctgctaatgatttatagataaaagcattgttttgatttttctttcttgatgcttgatatctatcaataacaataactggtttacattctggattttgttgtaagaaatcttcttctttcatatagaaatcttcacttgatgaaagtaaatgatgataattagttaatgataaatctctaattgcacctaatgataatgttaacatactttgaatttgcccttccttagtttcagtcagaccagcattttgacctgttaaacttttaacaaataaatcaacgaaacttgaaatacttgataaaaatgagaaaactgggaaataaccaatttcatgtgcaaaattttgaattaattgataatctttacgtgatttaataatattttcacaatcaatatagagaacattatctctatcctctaaaatcaagttactaactaaatttcttttaccactaccagctggaccttgaacaacaatcattgaattaacattttcctccaaccaaattttaacatctttagccttattctttctttcttccattaaatcatcaatttcactccataattcccaatcaacatcatccttttcttgataatttaataaacctttaactttatttctagttgtaatccaacctttccaaatttctttaaacataaaatgtttattccaatctaattcacctttaattttttcttgaatgaaccaacttctaattggatcaaaaattaaaactgcaatacctgcagcaaatgctaataataaaggaattgcaattcttggatgatctcttaataatgatggtaaccaatgatcattaactcttttcttataatgaatatgaacaattgtaccaccaatatctgcacctgttaaacaatgtcttgcacaaatagcacttctagatgtccaaaatgtaactaatgcaactctttccatatctccaggttttggaattgaaatatcagaaattttaccatatcttctaaacattgcatataaagattcttgtgataattcatcaccttcaaatttaacttttaaagtatgtgatgcatatctacccatatcttcaacccatggaacaccattaactgggaaaatacctaatctcagtaaaaatctatgctttttggataatttttcattaagattgtaaattaatgatttattataaagtttagcagttgttgcagctggcatttgaaatgtcacaaatgcaccaccatctcttgggactggtataatttcaacattttgatatgatgatgttaaatcttcaacatatttagttataccttcaacagttgttggataaatcaatggtgctataaattgtttataatcccatttggaactcttcggtgggcaaatatgatcaatataaagagttgttttatttttttgttttaaaataaaaccggtttcattaatatttgcttgatcaccaaaatttgtattttgaataattgtagtttcattaactggggatctgccactataagatgttgcaaatctcaattgttgatgaattgactttgatggatgatagtatttaggtgtgattaaccttatagtacgtaatgtactgaacatggttacttgccagaaggaaataaagtataacttagataagaaagttaggatggcaaaaaagtaaatttagtattttaaatttaagatgatgcatgacaattgcaatcattcgttttttctattgaatcagatatatctctgtaatatcaaggatatgaatgaagattttggtagtgataatggtaaggaatattcaccattatttttgaaactacgagctcagtctattaaacaagtgactgaattaatggattcaacaattaatagtatgtacgcattagagaaatctattggtaaactcaatacatcgacatctggaatgacaagtactgcacgaatatggtcaagtttctatgatcctaagatggttgaaaagttacgtaaaggagatgattagtttgtaatatatagatattatagatattagaagttatataattaagacactattagtattagtattgatctttacctgatataataacgttattaatctttaaaatcattctagtaagttgggttgctaataataattgttgctttttaccaataaaagtttcaataacgaataaatctttcatattattattattattaccaagacaatcaataccaagatgaggattattatttgcaacttgagcagcctttaatttagttaattcaacaattggattataacctgaattttccgctaatgacattggaattacatctaaagcttgagagaatgcacggaaagcatattgatcaatacctttttgtttatcagcttcttgcatgattttcagagaacatgaagtttcaactgatccaccaccatagacaattttattatttttgattaaatttctaacaacacaaattgaatcatgtaatgatctaattgattcatcaacaatcattttatttgaacctctaattaaattagtaactgtattaactttatttgtatcaattttagtattattattttcaattataatcattttatcccttgtagtaccaaattcaacttcataaactttatctgcataacctaatttttcaggagttaaatcttcaaatcttgaaacgattgaacctttagttgcaattgcaattgattcaatatctgaaccaccaacccatctaacagctggtaaattatttgataataaaagagaatttgcttcatcatcaaacccccattgacaaataactaaatttgcaccaacatttttaattgattcgatcatttgaataaatttatttgattcgaatttttgtaaatttttaaattcatcaacatttgaaatttctaatttatgttttgtctttggctttggaggttcaaatggacaagataaaattgcaattttaacattatttaaatttttattcatttgaggatgtgaaaaatctttttcaatacaaacaccattaattagttttgaatctgatattgaaccaccaactttaccttgtaatttaattaattcaaaatctacatcatttctattaaaatcagtaatttttaaaactgattcaacagctaatttagcaaattgattatgatttttattaacaattttagaaccaagtgaagttttagcagctttaaataaatcacttgattcaagtaaattattttcaatatttaatttatctatattaatttcatcagatattgaatctaaatgatttgaaataatttgtgaagctttttcataaccattagcgactttaattggatgaatacccatttcaattaattttaatgcttgatctaataaagcaccagctaatataacgacaccagttgtaccatcaccaatttcatcatcttgagattttgataattcaactaataatttagcaatttgattttcaatttgcatttcagataaaatagttgcaccatcattagtaatattaatttcaccatcgggagatattaagattttatctaaacctcttggaccaagtgaagttttcaaaatatcagaaacttgacgagctgcttgaatatgagattttaaagcatctaaacctgatgatttagttttatttgattgatcacgaacaataataagagggcggacccatttcatcctgtgccatgatggcattagataggtcaggcataggcatagacatttgttgatgtgacattattgctcctgtgatttttgaaaagaacccaagctattgaagtgtccatgaagtgtaatgtacacgatatttttcaactgaagatattattatgtaagacaatttttggtgataatttttttttattttttttttcacttttaatagaagaatagagttatttcatttcagacttacttttttgaagtttatttactatacaagtaatagatcatatactaaataatataatacataatgtctgctattggatcacttatattttgtaattcctgtgggaatttattagattctatatcacatcaacaacatttagtttgtgaagtttgttcaacatcatatgaagcagttaaatttagtaaattagaagttataacacatacatcaccggatgcattcccatcaagtttgaaaagtaaaaaatcattagttaagacaagtttgaaaaaggatgaagttgaagatggtgcaacaattaaggaaaaatgtcctcaatgtggtaatgatgaaatgcaatatcatacattacaattaagaagtgcagatgaaggtgcaactgttttctatacatgtacaaaatgtggatataaattccgtactaataattagtctttagtgttttataaaaagtttatatattagaaattatttaataaactataccttagcatattcaatttcattactattttcataatcccacatatcaagagcaacaattgcagaatctctaacaacttcatctttatcatttaataaatttttcaatacaggtaaagtttcaggagttgcaattgaacctaatgcttcagcagcttcatgtctaaccattggagcttcataatctctttgaacaacatcgattaatgaaggaacagttattggattacacatttgaccgaaaatataagcaatttcatgtttaaaaagagctgaatcatcattaaaacctgatgaaagtgctaaacatgcatcatcagtacctaaatctcttaatctaaacattgctctatatctttgaaataatggttgattattatcattaagtatatttttcaatttatcaattttatcagttgaattatttaatggtaaaggtggagctggatcaattgattcatataaagatttttgtaaaatttcttcctttgataattttgaattttcccatttaattctttcaatagctaattcacaagtttgtttaatttctaataattcatttggatcattaaaatatttaattaataattctaaagaattagaaatcacctaatgcacctaaagcttcagcagcttcatgtctaaccatacattgttgatttaaatcttccaatacatttcttaaagttggagcagcatttaaattatgagtttgaccaagacaatatgcaacttcatgtttaagtaattcagaatcatcattaaaggcttgtgatatataatcgattgctaattgagcattatttggatcattttcatgatttgaaccaatagattttaaatagaataaagctctaaatctatcagataaaggagttgagcctgaggagtttataagggtatcacgtagggtttcaagggaggaagattcgttcattgctataaagaaagtggtatcattaaggtttagaaagtgaaaagttttaaaaatttttttttcccatagtaaattaataagagtagcgagatttttacttagtactatattatacgacactttcttcttatataaaggcaataatagacaatatgaagacaattataataccatgtgttgggatggggaatgtatcccaatgggctgttaatactatgattgagaatagtagtaataagaataagattccacttgatggtaaatatttatatccttttattaatgaaaagggagatacaccattatgtaaatggtgtaatgttaaaaaggatattgatgtaattcaattactgagtccaattataccaggatatgaatcattatttattaaacaaatagttaaagaaataattgaaggtgaatatgagaaaataattgtaatggattcattagataggggtatctatgatgaaggattaaggatatggcgtaagaatagtataggtgaattgaatattaataataatagtaatgatgaaaccaccataccattagaggatactagtttatttatgagattattagttaatacactaagtgaacaattaggagaggaagaatttaaaattgcaatggaatggatagcagttagtgtatatgatggtatcaatatagaggcagtcaatacactgttaaagaaggtcaatgctgattgtacaatgaccttaaatgataaagatagtaataaagatagtaaagatagttatataggtgaagtttatgtgtagattacgtaataaggaagcattaagtaaattttttcaaattgtccatttctttactattagtattagtatattagtattagtattaaacattatcttgaagagtacttcctttggacaatgaacactgttgctgttagacacttccattctactcctcaaactcttctcagaagaccttggaaaacttataaagatggtactctcttctatggtcaatcaaaggcaggtaataagagattacctctttcaacaaagcaaggtaacaaaaatttttataaaggtactagatcttcaggtattggtcatttaaataatgttggtacttatgatattaattataatagagtacgtacatttgttgtacctgaagatatgtcaactcctcttaaacctttagtttctccttctgttccaattcctaaaaatacttttaaaggttatactggtataactgatggtcgtctttggttaaatcaaattaaagaatatattaatactggtaatgttacttttgaaaaagatggtaatatagaaaaatattaatatcaatattaattattaaatgtcttacttatatatcaatattatatagactctgtatatagctcatcaactttgtctccttcaccctctccttcctctatcccattactattcatattttcatgcatttctctacttaatctctcttcatcaactgctcttaatttaattaatcccttattcattaaatctccaattgctgctctctttggtactatatccctcataaatccataaacatcaacactcgatactactttttgtacatcattataaacaatcttctttctattattactcttagtaactgtttgtgaatcttgtattaattgtttaataaatagttcagttgcaatacttaatacataattagctgattcagttgatgatatatgttcaggatctaatttaattatcttcttaactctactaataggtaacttccctgattcttccatgatgtctatatgtatgtatttatgtgttctatacccctctatatactctattaagaaacagtcctctactacaacatgaatacaccatgttaaaattaacgcgatttattatgcatataaaacccattttactatggaatcaacactttatttcctttaaacaaaccctttatacagcaatggatcaaccgtggattgaaaagtatagaccaaagactctaaaggatgtctcatctcaatcaactactacaaagattttagaaaaatctcttaatacagctaatttacctcatatgttattttatggtcctccaggtactggtaaaacttcaacaattttagcaatggcaagacaattatatggaccaaatttaatgtcatcaagagtacttgaattaaatgcttcagatgaaagaggtatttcaatagttcgagatagaattaaaaattttgcaagattagcaattacaaatccttcaaaggaagatttacaaaattatccttgtccaccttataaattaattatacttgatgaagcagattcaatgacaatggatgcacaatctgcattgagaagaacaatggaaacttatgctaaagttacaagattttgtataatttgtaattatgttacaaaaattattgatcctttggcaagtagatgttcaaaatttagatttagaccattagatgaaaattctgcaattgaaagattaaattttattgcaaatagtgaaaatatttcaattaataataatttaattattgatattttaaatgtttgtgaaggtgatttaagaagagctgttaatttattacaatcagtttcaacaattttgaaaaataatcaatcaattgatataaagacaatgttcggttatttacctgattcaattataaataatttaattgatttattaaaattgaaaaatttaaataaaattacaacttttacagagaatgaaataattaaaaatggttattctgcttcattcttacttatttcattacataaaaatttattattaaattcaaatttatcttcaattgaaaaaaataaaatttcacaaattttatataaatcagattctctaataagtattggttgtaatgaaaatattcaaattattaattgtttatataacttaagtaaagttttataaaaaaatattttataagaatttatatatatttataatggtttagatttacgtttaagtaacatcattaatggatgatttggtggtaatgaattagattgtattgaaggtgatgatgattgggattgtaatggtgaatattgttgtgatggtgatggggtaggtgatggtgaattattctgtattggtgtttgtataggtgtttgaatgttattcatgttgttcatgttgttcatgttgttcatgttgttcatgttgttcatattcatattattcatgttgttcatattcatattcatttgatttggcatttgatttgacatttgattttgaaacataaatggcatttgcatcatatctggtgggaattgtggcatattaaatggtgagaattgattattattttgatatagattttgattttggttttgtggttggtttgatggtggttgaccttgattaagatttggatgtatattttgatgagggctcatattattaatattggaatttggacttgaattagaattatttgacaatcctcctggaaatccacctggaataccatttgacattcctcctggcattcctcctggcatccctcctggcattctattcattaattcttggaaaaacatttcatttttagatccattattaactgattgaataggttgaacagattgttgattaattgttggacttataggttcattaattggtttatcaataatatcaaataatcttgattttctaccttcatccttaccgaaaactcttgaattattactatttaatgaaaaatcaaattggtcatcaacactgaatacaggcttagcttcaacttcctttatttcatttttatcacttagtttactttcatcctctccttcatcttcttccactacaacttcctctcctctcattttcattctccataattcaaaatcttcaatcgtttgtggcatttcctccatcttaacatttggaatattattattattatgattattattattactaccacctcttttcttattctccctttgtctagctctttgagattttctatcttctctctcatttgcacctgcacttgctcttctactactattggatttacgacgttcaggtttatttaatctgtaaaattctatatttggtaattctgacttccaataatctccttccataactaatggtgaatgttcaagttttcgtaataactcaacatcataaattattctactctttgcctttaacatattaaataatgccagtcctggatctacagtctccatattgtatatatgttgtctaaggatgagctttacctatatacaataaatgctaactaatactaatctataaaatacgtaatccatgccatgaattgaccgctatttcctctgcatctgcaaccatcaccgccgcattattttcattttcattttcattttcattttcatctccaccaatttcactcattaacagtagctgcaccgccgccgaatcaccacatgcaacgagttcacttacctctcttagtaacttgccactacgatatctgttatcatctccactgagttgtacatatgcaatggtacattctaataatgcttcgtattcatctttatcccatttacgtactccaatgttatcaataatagaaacacctctttcaatccaattcattcctgtcgacgcatcggcgcggacagtattactgttatcattaccgttatcattaccatgaactacaatacctttacgtgcataaacagcacatagaccttcatctgtatcagcatattgatatgcctcttcaacacttttcagtgcgttttcataatcatcacatttttggaaaatacgtgaaactgataaccaaatatctctcattattttacgttcattaaaatcattttcattagtatactggttaatatgattatgattatgattatcttcattttgtaatgatttacgtgaagatttagatgatttagatgatttggaagatttggaagttggtctctcattttcttttcttttatgaagatgaattggtttagttattggacgtaaaaattttcttaaactttttggactttcattagttgtataatttgtacaagttgcagctgtcattgttgcatcagataatgcatcatcactttgtacaatcggttttgattttttatcaatatttaatgttaatatttttgtatcttggaaaaatgtattaacaatactgaaaaatgatggtaatgcatcaattgcacaatcacctaataatgttaaaaatattaaataagtttcaattgcatctttcttccatttgaatgaatgtgaaggtttattttcgttattattctcaatctctgtttctttatgaattgtttcaataacttgttgacaaataattaatgattgttcaatattatcttcatcccctgttaataattttgtataatgattaatatattttaaatcatttggagaatttttaattgctaatttactcattttaattgattctccatatttttgacatttatgaaggtaatatgattgtttataataaatttgggaaattaattctttatcagttttagaatcattaatattaatatctttaatcattaattgacatttttgataccattttataacattatttattttcttatatgcattagtttccattcttaagaaattttcttgaatttcagcaaatgaattataaattatcataccttctctttttaaactatcactataattttgattatcattaccaattatttcagtaaataatttttcaatatttgttaattctttaaaccattgttttaattcatcatattcaacaacggtttcaatattttcagaataatttttcaataggaaaatataagttttcattatatctaataaatcataatattcatcattatttttaactgtattatctttaacataatttaaataagttttaaaagtagccttagattcttcaattgaacctctttccattgaaactaatgaccataatttcataacttggatattttgatatgaaatataaatatatttacttataatatcataaatatcaattgagaaattttcaaagatataacttgttaaaatcattaaattattgatatcggtttcatttgattgattagcagttgggaatttaaatttagattgttcctctgtaagaaatttattaaatttcttcttgaaaatgtcgagttcctttgaattattttggaataagttaaaaccaaaatagaacattataattttagatagagttgaatttgaattagcattagaattagcattagaattagagataatttcattaaagagttgtttgaaattatcataatttgaaacattgacaaaaattgttttattcagataattagagatatcattaagtttatcccaagctaaaatatttgaaaatttaggtaatgaaccaatttctacattgacgattttattaataacaattttattaatattagttgtatcaataccatgattagttgattgataatgagataaaattgaaagtaagattgcataatcgaattcattagtaattgatttagaattcaaccattcatcaataaaatctgtatcattatcatttaatttcatcagaatagcaatcgttgaatctgatgttatatcattattgatggtggtggtattattattattattattattattattattattattattattggatgtatgattcttgtagtatttacaaacatctacaccaaagatgactttctcctgtattggagtgagcattggagtaacagtagttactctttcaaccatatctctagtcatttacccactagaaaggaagttatggtgtcagtgtcctgttaattatatacaaatacaaatacaaaagtgaaataaatcatttggagattggatttttctctaaaacttcaatcactgaattgaaacatgaatgtttatttcagaaatgcatctttaaaaaatctataactgacaagttagaatttagtagataatattatattgtaatcagtatattaaaaataaaaatattgtctaataataactatcgtcaaatccactctcatccttactgtgcaagctgaattgatcaaaatcaatggctacaacagttgatagcacaacacatctcttatttaaatctaaactatgactaccattaggattaaattctaaactgtagataccaccatctgaaaacatctcaatttgccaattactcatctttctagtaacttgtgcacatttactaccatcatttacatcaaatattgggaattcccatgaaaggtattcactcttaatcttaccaaataatcgaccattctcaactaattcatatttctttttaaacaaagtccatttctcattacattcaccaatttcaatactttcatattttctatcattctttttccatctattatctgagaaactatacattccattacccataccattatatggtattgaaattttacaatgtgatctaataactttaaatggtcttgtaacacttaataatatattaccttgcatatcaattaaatcaatacaaaatggtctatcggttccatcgagttgtctactaattgcacctaatttacctgtcttacgttcaagcatcataccaatttgtactccttcttcattgtatatctcatattgcactgtttgttgaatatctaaaaatacattccattcttgtacaactcttttaattgaaattcttggtaatgttaaaatataagagagtgtatcagttggtggtccattcattgtcgattattattattattaatttgctcatatcagtgtcttacattatttgatcatgttgatgttttctcagtttgtatttaaataccaagattgaggctcaaattacaccaatggcgtcagcccacataaaaaaaatttttgagaacaataaataaaaaattcatcacttctattatacaaattacagatatacggtcattataggtggcttatattttatgttatatgttaatgatttaacagttcaccgtgtaatatctcataagccattctacgacgtaataataacatatcagcttgggaataatctaattctctatttctagcaataaaatcaactgctgtacatgtaaataccccacagtcataaccattttgttgtgtcggacattcataattaccgttgatattataaatatcaaaattaattggtaattcacctccattattctttttagtctcattctccatatattcctttaataaatataatatatcagtaccatctccaaataatgaatcaacatatgtaaaattcttattaagattatcaataactgctaatgtccaatgactttgatttaaattaacatggtacaaatatataatccatttcattaacatcaactttggctctcttagcccattttttaacaccatcataacccttggattttaatgtagtataaaaataagtactgaatacatgtaccttattaattttcttttccataacataatctttaactaattgtaaataaaaatcaattatattatcatttaaccaatgtctatcacttaatgtaaataaatctcttgatgttatattaatacgatatttattaattaatgtaccttcaggttgatctaaccaaattaattcaatttccctattctgttcttcctttaatggtcgtatacctaatccatgttcctttaatttagataaatgtaataattgttgcatcttcttacgttctgctataatattttgatattctttgaaaagtttggtggattctaaattattcaaataatcatctctatcatcctttaaccactctaaatcttgaaatctagtggttgatcttgtaaatgttggtttatttacacgatttatttcaacaattggttgacgttcttgcatcattaacaaattctttttaacttcgtttgatttcttgtataaatcttgtttaggccttttatcaatatttaatgcggccttaaggaaataattctctaaattgactgggttaccattagttttgttattgttgaaaaatcttgtaccgtattgatattgtggtttttgacgattttcaatatctctctcattcattaatatctcagtactattggctaattcttcattgttaccattattatcttcgttaactactttcccattctctctttcattaatttctcttaatttctcataaaataatggatttttaggtttagcatttgcttctctactatcttgaaaaatcatcttggttttattaatcattggagtactatgtgccatatcaatatcatttgataatgatgttgatgtacttaatggtctattgatattatccttccattcaggatttggaattgttcgtattttattgactaatattgcaatcgtactatttaataaccaaattatccaataaaaccctttatttaataacatataaataagataacctaaattaatcattaaatggatgaattgtgaataaggatatgttttaccattaattatatcatttgaaataaatgcattatttttctcctttcttatatcattaatcttatttggattaaatagataactacgattggaaaataatcttgatgaaacatcagttcccgatgaccaaactcttgatccaaataatgattgtgatgggaacctaaattgattctcagaaaatttctcattatatgaaggtatattagttgccggtttagaaacttttggtacgttaggtggtaatctactctctgtaaaaaatgtcttgtttattggatgattggatggaacaaatggtagttctgccttttcatttaatttatgtttgataaatgtttcatcagaagaaatgttattcatattatgttgaagtgatgtattagatgatataaatccattatttgcatcattaaatccattggatgattgtttactttctttacttgatgatgcaaaactaggtaaattattataattgtatctgtttaaatatgctgaatcaacagatgatccactgaaagttcttttcccgttataatccatccttgttcaaaaaaaagattggtaattgaatcaaaatacaggaaaataatacacgattgatgaattttttaaaaaaaacaagtgttgtttactatatgaaaataatgaaaacagacaaacaactattaaattatttggaaagagatattttaaacaagaaataacgacctgtaacaagtccaaggttaaaaatattttaaacaactgaagagagagtgggaaatagattttttttcatgatattacgtaatatactccatgataactgtataagttaacgagcaaaagtaaagtcaatcaatgaagttgtgtttggttgttgcaatgttacaggtttcaatggatatatatcaatggtggtggcttctgtatttggttcacttatttcagactcattatcattatcatctgcatcaatacccagatttggattaatttcttcatatttagcaataaatgagtcttctaattgggaagcagctgcaaataattcattatcggatacattatgtacaatatgattaagcatttcataacagtttaatatcaatttgttttgtttattcttcatattttgtaattctgaattaatcattgatgcatcctttgatattttaattttatcagataaaatttcagcttcttgaattatctcatctgggaataaactattctttttaatcatatcaattccatatcctgaaacccaattaatgcctggacttattttaaattttgcatcctctgttatagtattatcctttgaaacacccatatgcaactcaaaaactcctggtttgttttggaaaattttagggataccgacaaaatgcgtaacaaacatacaggttgctcccatattcctaattttttcaataatactaatacataatgccatacaatccttataacctgtacctctaccaagttcatcaattataattaatgaatctttatctgcgttttgtaatatgaaagacatttcaaccatttccatactaaaagttgataaattaggtttattagcatcattggcaattctagtgaataatgatttaaaaattttcattgttgcaaattcagctggaataaacatcccaatttgtgctaatataacattgatacaaaattgtttgatataaattgacttaccactcatattaggtcctgtgattatttgaactcgggatgttttatcaataatagttacatcatttgaaattattattttattttcatgttttttatcagaagtaaataaatgttcaagtaatggatttctaacattctttaaaatcacattattatcatcaatctcacaacaagtataagattcgtattgtggtttagtggaaacaattgcaaaactgcacatcaaatctagaagtgaaacagcttcagaaataataaaaaatgttgacacacttttccggcatttatgaattaattcatcaacagtatcttcagtcattaagaagatttcatttaatactgaatcaattcttaaattgagcttggtaatattcatagtaacacattcaatattgtgacctctttggatgcaattaataaaaggatgattttccagctcttcaaagctatccattgaaaaatcttttataaagatgtaaaatcctctattcttatcatatctattttctaatggtgtattgtatttttcacttaaatcatcaatttctttcaatacttcatcgattaaagttttgtataattgcctactagcatctaaaagaccattgtatccaactttaatagcataacatttttgatttctcaattcgattggtttgctaacccatgtacaatcttcattgatatattcactggtgagctctaatgtcttgttaacatcttcatgattaaaaatgttaagaatttctttcaacaatttgctgttaagtggttccattaattctcgtattgtagctattttcattaacattgttttcataagtaatataaaatttaatttttgttgatttacctcttcggtgtttatctttggctttttacaaagataagagaataaattatctaaatctatcatagatttcatttcaattctcaaatccataacaattgtatcgttagcaatcaattccttaactgtttcaaatcttaaaagcaatgaagttttatttgttagtggttggataatattgtttttgagaagtctttcacccattttagtaacagttgagtttaagtagttaaataaggtaacttttttacctgtcttagtagtggaattgctatttaacaattccaagtcttgtatagcggatgcattaataaacattgagtcttctgatgattcgtatttaatattaaatttttcatgaataaaggaatggtttggtaatgtttccaagtaactgatacaagcacaggcagaagaaagacaatactttttgtttcctaattctattttcattgggcctcttttagactcttcaatgtttttgcaaataaaattcaatgaatattcattgtatttaaataaatgatcaggaatatagttaatattaaaattgctttgaatattagctgtaagaattttaacaaaatttgatttagatttctgataactatttggaactaatatttccaataatcttatatcatcttgaactaagagtttatgtacagttctaacaaaagttggtgagtctaaaatttctgttaatctcatgaaacttgtatgtggatcaatcatacaaataccaactgatggagagcacgtctttgattctgcaatagcacaatatacaacggagtttacatgctgtgcagttaacacccctgtgtattgggctgtgatggctctttcatttgatgtctcagctctacttttccctctagcagttgaattattaacattactgaaatttccaatatttcttgatctctttgaagaaatcgccgttggctgagcccacgtcggtttccaagctgaaacatttccgattgccagattagaggttgaatcatataatgaatgataagcaggagttttacttctatccatggtagtagatagattgctaattgagtagttaaaagttatattattaagtctaaaagatattgaaagctataagaaatgtaagaatgtaatgaaatgaaattaatgaaaagcaaaaaaaaaggtgtgcaaaaggggaaattgtactatttaatggtaatcttatcaacagcttctgccaattcgtcaatgtcttcttccttcttagtggtggtgctttctttggcatcttccttaagaacaggagcaacttcttcaaccagtactttgagattttcggaaacatcttccttggcggtactttcacccttgatctgcttctttccttcaactatcagctcttctagttcagcagaccattctaatctctcgcagattaaatccacaatcttatcgcagtcttcttgcagaaccatatccgttttcctgggttttaattggaaatcaccacatatctctctgtttattaacacacgagtggcttttttatttacttctgctggtaaattagcaaagggataaacggctaatgaagtacctgcaacaatggcaagatcaatatcatcaatgtcttcctcccaaaaatcccacattttagccggtaatgcttctccaaaaaatacaatatctggttttacataacctttacattcagagcatgttggtatctcgtttttatccatgaattcacgtaactccttatctgacatttcatgatcacattcaatacaatgatttccactaaatgaaccatgtgcttctaaaattttatcatctgaaacaccggcaatcctttccaatgtgtcaatattttgtgtgtaacaacgttttaacaaacctttatcttgacataacttaatgaaataatgaaatttacttggtacaaacttccctgggaataattcttctgcaagtgtataaaatgcctttggtttctttctgaaatattcgatgtcaaaaacagcttcagggtatggtaaattgagtcttttcaaattagcatatagaccagttttaggagatctaaaatcaggtataccacaattagttgatatcccagctccaacgaaaaatgcaacttttacatctttcttttttaaaaatgaaactatagtatcgatatattcttcatttgacttcactggtttgtctgtcttgcttttggttttattgggcattaaattgtctatgtattgtattgttcagccaactaacacactataatatataggaaaagcaatcccccataattaaccttaccgttcctccatacaaattaatgtgtagtgcgagttcaacttcaccaaccttcgttttgaacttttgtgatgagtaacattctcttttttcattccgtccctttctatcaattcggtaaaacagtactattgaatcaataaatatattggtttaagtttatagaagttttgaaaattgtgtgtcggggattatattttttgcaaaacacataaattataaatacaatgaagcaaagagtttcgtcattagatttgaaaattcttatcccagaattagagagtaagatcaaaggtcatagacttcagaatatatacaacttagtagtcaacaatagatcatttttattgaaattcagtttaccagactctaaatttaatgttgttttagagtccggatttaaggtatatttgactgacttccaaagaccaacattgcctgaaccatcgaatttttcaactaaattaagaaaacatttgaaggctaagagactcactaatgttaaacaagtaggtgatgacagaattgttgtcatggagttcagtgatggtttatattacttagtttttgaatttttcagtgccggaaatattattcttttagatgcagatttgaaaattatgtcattatatagatttgttgaagctattggacaggttcaagaggggcagtatgatattggtgctgtttataatatgtttgataaaacattatttaatgaatctgacattgatccacataatgaagtttatgataaggatttaattcttaaatggatcagtgatactaaacaaactgaaagagagaaaaagaagattttatctgttgaaaaactatgcttccaacattcagcatacttatcatcagatttaattcatattcaaatgctaaataatgatatcaaaccttcaactagttgtttacaattattagaggatgaacaattgatggaatctactgttaaagcaatgaatgagtgccaacaaagatataaagaattacttgccaaacctattggtgaagttgatggatacatcttaagcaagaaaaatcctttatttaaggaagaagttgaagcctctcctgataacttagaatacgtatatcaagagttccatccatatgaaccaattcataaaattaaggatggtgtgaaaattgaatgtatcaaagggtacaataaaacggttgatgaattcttcaccaatattgaaatgacaaaagtttcattaggtcgtcaaactcaacaagctaatattgaaaagaggcttcaatttgtcaaagatgagcatcaaaagaaattacaagcattggatgaagttcaagaattaaactttagaaaaggttatttgattaatttttataatgagcaaattgaacaatgtaaagaatctgtccagaaattacttgatcaaaagatggattggaagaatattgaaaagttgatcaaaattgaacaaactagaggaaatgaaattgctaaaatgattaaatcgctaaatttaatcaaaaatgaaatcaccgttagtttggttgatattgatgaaaacaatgatgactctgtttctaactctaatgaagatgatgaatctgattggggttccagtgattccgattctgactcagatgatgatgatgatgatgatgataacgaaacagaagatgaaaacaagaatagtgtgaagtctgacaataagaaaaaacagaatgtgactaaaacggttgatgtcataattgatatcacacaatcagcatttgctaattcgtctagatattttgatgcgaagagatctgctaaagacaaacaagagaaaacagctaaaaatgctgctattgcaatcaaaagtagtgaacaaaaaattcaaaacgatctgaaaaagattgaaaaagaaacgaaacaaaatgttgaattcaagcaattacgtttgaaatattggtttgaaaagtttttctggtttatatctagtgaaggctacttatgtattgctggtagagatgataatcaagttgatacaatttattatcgatattttgataatgaaacagattttctggtttccaacgatcttgatggtgctttaaaggtttttattaaaaatccatacaaaaaccaagatgttcctccaaccacatttatgcaagctggtattttctccttatcaactacaaaggcatgggaaaataaaatggttactagtccgtggtatgttgtcggtaaggatatatcgaaaaaagattatgatggaactattttacctgatggtctgatcaatgtttctaaggaaaggaattatttaccaccatgtcaaatggtcatgggtgctggtttattatttacatctgatcttgaaacttttgctaaatacaaggaagcaaagatcaatagagatgaagaactacaattggtttgtaatgataaaactgttggtaattctaataagattcaagaattaaacaccatgttgaagaaacttaacgaattggaagaaaagtataatgctgaagaaaacagtgaagctaaggccaacgaagttgataacgcatctgacagtgaagatgaaaatgataagcaagaagcgtatgtacctgttgcaccaactccatcccaacaaacacaaactaagattagaggtaaaaaaggtaagatgaaaaaaattaaggagaaatatggtgaacaagatgatgaagatagaaaattaagaatggctgttattggtactttaaaacaagttgagaaaactgaacaaaaggaacaacctaagaatggtacctttgttatgacatctgcaatgaaaaaacataagaagagacaattacaaatcaatcaaattaccaaactaattacattattagaaaatcgtaatgaagacaatgatgctactgatgatattgattatgttgaatattccaagattgttaatgattatgagaattatcatattaatatcacaggtttattaccttccccaaataaaactgacaatgttactgattgtattccagtatttgcaccatggggtgcccttaacaaatatgcttacaaagttaagttacaaccaggtactttgaagaagggtaaaactgtaagtgatactattgaacttttcaagagacatactttagaattacaaaaggaagaaagtgattggtatgataccaaaaatattattgaattgatgagtcaacaagatttcatgatgaatttaactgcttccaagtttaaagttggttcaggcgccggaagtaatgataaaagtaaaagtagtaaaggtggacatggtaaagtgaagggtggatccaagtctaagggtaaaaagaaatagtatagttaattagaacattcatttataagattaaattttaacttcttctatatatttattcatatcaatgcaatgatgtaatgattatgaatttttaggatataaatttatatcgtaactaaaatatgagatattaatatgaaatatatgaaatacaaaatgttttgtagctggggtaatagttttaaacaaaagcaaattaacttcaaaatccttgttgcaaacgctctgcaatattcttctttgcaaaattgaaagcattaaggaaacctttttcggatagatcaattttgatgttaccaacatcttcagttggaggatttgtaactcttgcagcaattgcgctactatcagtttcaagaataataccatcatcaacagtttcatcaattgcaattacgaccatatcataagattccaataatgatcttttatctaattgagaatcaagaatgatttcaaaagcaccagttaaaccttgtaatacattataaagcagaatttcattttcactaagtccaccaataatgtatacgatgaaatcggaatattccttataaacaattgtatgactttcaaacagtattatatcagagttttgtttgaatgttttcttgaataaatcagcttcaaattgtttttgctttttagggtttgttattaaatcattttcagtgttttcatgtggtgatttatagtatttagtgaatattctatttttatcggagtccaaaataaggatggcatcaatggaatacagggatgtgtttgcactcattattatttattatctaagttaatgtttggtcactctgtgtatatgatcagaaaatatacaaaatctattatactaattgtttcaaatcaagcaacaatttcaaacttgatgacaagctattataatagagaataccaaaatttcataacttccatgttgaaagcgcgcactttggtactaccctgggcttaaaaaaataatttatttttaacatgaactggggatttgttttttgaattgtgagttacccaattaggaaactattgtttaattgttgtaataagtgtgtatagaattattcttttgatttcaattttaaaatacataactaatggcaaagtattggtactttgaagtagcattataggctaaaaagactttaaagataatactaaataatatttacacaaaaatttctttcttttcataaactttttttcaataatttaacaattcaaactttttaacaaattttttaaggtttttttttagataaataaactaagctaataattgatagtattttaccttgctataataattatatgacaatgataaaaccactcactgtaagcacaaactattaaaaatatatgtaccagcacaacaaattccctgtcgctatgtaaaaatcagtctgtaaaattgcccactcaccgagaaaaattcaaattgccccccccccttaaacgataattttcgacatggctcatcgattaatactaacttttaaattgtgtaggaacattgctgtagggcaacttcacaattatacacatgttcataactgaatccttttttcttttgatgtttcttttaaagaacatcgatctttagttgagttaattgacagtattcattaaatatgatgtcaagcaaccgctatgcatccaagacggcttcaccgtcaggtatgaatctgacccttactaacttaaattatttttcaaaccttatcttttaaaaaaaggattgataaaggaaatatccataagaatttatctttaaatatacaaatactaacactacatgtaacttattctcattctttttatttatgtaggatcaatgcgaagtactgatgacaatattggcgatcttagatctgcactaagtgaaaagacagctcaaccattcagtgcctttagagcacctcataataataatagtagatggaataatgttgataaattaggtgatatctttggtgcccataaattttcagataatgatttttgctttgatgattttgctgaaaagggtatctctgatacttatgaaaatcattatgatccttatccggcatggtcaattgaatctgctccaattactaaggatagaattcaatctatctttattcatatctcaaaaatttttggatttcaacttgataatactaaaaatatgtttgactatttaatgaaaatgttagattcaagagcatcaagaatgggtccagcaaaggctttaagaagtgtccatgcagattatattggaggttataactcaaattatagaaaatggtattttgggtctcaaatggatattgaagatcatataatgtcaactaatccaacttatcacgatttatcaataaaggaaagaagaaaaatactttccaatcataagtattctattaaagattcagaaacaaattggattgaaaccaccaactcatttttacctgaagattgtattattcaattagcaatctatttactgatttggggtgaagcaaataatgttagatttatgcctgaatgtatatgtttcatattcagaacatgcgttgattatttttattcattagattttacaaatgaaatacaaccagcaactgatagctttcttgatcacgctattacacctctttatgaattttatagaaatcagttatattcaaaggtaggtgatcattgggttgtcaatgaaaaagatcataaggatataattggttatgatgatataaatcaatctttttggtatagaaaagggttagacaaaattgaattatacgataaacaaaaattaatggatattttacccaaagaaagatttctatatttgaatcaagtcaattggaatgtatctgtttccaaaacttattatgaatccagatcttggttacatgttttgattgatttcaatcgtgtttggaatattcatttgggtgtcttttggtattatacatgcttgaattgtccaactttatatacagaaagatatcttattactgcagataatcaaccttcaatggttgctacattagcatctctttcaatcgctggatcaattgttagtttcttgaatttgtttgctttgattttagaattagtgtttgtcccaaggaaatttgcaggtgctttgcctattctttcaaggttaatctttgtttcaacttgcgctattttgactaccttcccaacaatttatattttccatttcactggtacttctgattcatctcctttgacatacggaattgcagtttcacaatttattctatcattatttgttgttttctatttttctgttgtgccattatcatcattaacaagcaattattattccaccaactgaaagaagttatttgccatcgttgtattttacaaattttattcacaatttaaaaggtaaaagaaaattggcctcattaggtttatggggtggagtttttgtttcaaagttcaccgaatcttattttttcttaactttaagtttaagagatccagtgagagaacttagtattttaaagattaatagatgtttaggtgaagaatggtttggctcatttttatgtgaacaagaagcaaatattattcttgcattattatttttcacagatttagtattgtttttcttagatacatatttatggtatattatttggaacactgcattttctgttgctacatcattttactgtggggtttcaatttggactccttggagaaacatgtttttcagattaccaaacagaattaggtccaaaattttgaactcttatgccgttaatcaacagaatgaaacagaaagaaaaaatatggttttgaaaatttggaattctataattatttcaatgtatagagatcatttgatttctattgatcatcttgaaaatttaatttatcaaagtactgttagtgaaactggtgaaaagattatttctgaaccaaatttttttattcaacatgaagatggagaaactgttactgcaagaaatgattacatgaaatcagactcagaagcagttcgtcgtttatcattttttgctcattcattatcaacatccatagcatcagcaatgccactagaaaaaatgccatctttttcagttttgatcccacattattctgaaaaaattactttatcacttcaagaagttattaaaagggaagacgatttttccaatattactttacttgaatatttgaaaaatctttataaagatgagtggcataactttgttagggatacaaaattattagcatcggaacatttcaaagatgaaaaagatgaaaaagaatttagtgatgttccattctatgccgtaggtttcaaagctgccactccagagtatattttaagaactcgtatttgggcatcactcagatctcaaactttatttagaacaatttctggttttatgaattattcaagagctattaaattattatattctgcagaatgtgatgatccagatgttgctccattaacaaatattgaagaagcaaatgttattgcaagtagaaagtttagaattgttgcttcattacaaagaatgaaagaattttctgaagaacaagaaaaggcaaaagaatttttattaagaacatatccagaacttcaaattgcttaccttgatgttgaaaaggatcctatcacccacgaatttgtttattactctgctcttattgatggtaattctgacattttaagtactggtgaaagaaaacctaagtaccgaatcagactttcaggaaaacctattttaggtgatggtaaatctgataaccaaaatcatgctatcattttctgtagaggtgaatatgttcaattagttgatgcaaatcaagataattatttagaagaatgtttgaaagatcagaagtgttttgaacgagtttgaagaatatgaatctccagatgatccatatacatatgatccaacagacatgtctgtttccgttgatcatatccacccagttgcaattttaggtactagagaatacattttctctgaaaatattggtgttttgggtgatattgccgctggtaaagaacaaacatttggtacattatttgctagaacattagctcaagttggaggaaaattacactatggtcatcctgacttcttgaacacaatttttatgtgtaccagaggtggtgtttccaaatcacaaaggggtttacatttaaatgaagatatatatgccggaatgaatgcaatgatgcgtggtggtagaattaagcattgtgaatatttccaatgtggtaaaggtagagatttgggattctgttcaattttaaactttaccactaaaattggttcaggtatgagtgaacaaatactttccagagaatacttttatcttggtactcaattaccactggatagattcttatcatttttttatgcacatccaggtttccacttaaacaatgtatttattttattatcattgaagatgtttatgcttttttgtattcatcttggtgcattgacaagcagttctgtcatttgtacttacaataaaaatgttccattcactgatgcaagaaagccggttggttgtactaatttgatacctgtcattgattgggttcaacgttgtgttttatctattttcattgtttttggtatttcatttattccattatgtatccaagagttaatggaaagaggtgtttggagatgtatttcaagattatcaagacatttcacttctttatccccaatgtttgaagtttttgtttgtcgtatctattctcaatctcttgttaatgatttggcaattggtggtgcacgatatattgcaacaggaagaggattttctactactagaacatcatttgctacattatattcaagattctcatatgaaagcttctactttgccggtaccttatttatgttattactttacatttgtttagtcatgtggaagtttagtttgttatacttttgggctactgtttcatcattattcttttcaccattttggtttaatccaaatgcattcaactttacagaattttttatggattacaagagttttatgaaatggttatcaagtggaaatgttagaacaaagagagactcatggatttctcatgttcgttctacaagaatgtccataactggttcaaaaattaagaaatctaaaaatgatcctacatttatgggttctaattatttacgcccttcattagtttcatcttttattgctcaaattggatccaaatttgccacaacattaataatagttacagcatacctatttgcaaactctcaaaaccaaacaagtggtaccattccagcaaattctttgctaagattattagttgtttcattttttccaattgttatgaatgctgcagtgttattagtattattcgttgtatcaatttcaactgggcccttaataatgtgttgttcaagctctttcccagggatgattgcaaatttagcacatataattagtgtttttgtttatctattctcatttctatttttattgatttgtcaaaattgggatatatcaagatcaatcttaggtgcatgtgcttcatataatttacaagaattattttttaaattagtcacaattttattgttaaatagggaaataaaggatgaaaaatcaaacaaagcatggtggacaggttcatggctaacttcaggtttaggatggcatgtttttactcaaccctttagagaatttgtttgtaagattatcgagatgtcatattttgcattagatttcttaatttcacatttcattttactctgtcaaattccggtattgtttattccatatattgatactattcattcaatgttattgttatggcttaaacctgaaaacatgctcaaaaaacctatttattcaccaagcaagagaagaatgagattcagaataactattacttacttcacattattctttttcaatatattttcaatttgctctgttattattgttccattagttttgacaaaattctttaatgtagactttgatcaatatatgcctgagattattacttcattatttcaacctgttgagatggttaacaagagaaaaggtttagaaaattatattcctccaaaattacatggttaaaaaaccaaactttgcttatattatataccacttttagtgtatcagtttatgttataaatattatataaatcatattattattaattagaaaaatagttatcaccatgtcatgtacacggttgtattaattccagtaatcattaaagttaaggtttaacttgctttcaaagagttcttttagcttatgcgtctttttagaatcagcaaacattgaagtcaaatcaaatcttggaagttgtttgaaagttatcaaaagatccgttattttggtatgatactcagtaatgtcattttctaaaacgtagttacttgattcaagaaatagatccaagacatacggttcaaccccggtaactttaaatatattctgataatgcaatactggtatgcttaaaatgtaaatataatatttctgtatatctttactactgttgtctttcaatgatatcagaaattgcactgatggatattgtgggaatgttaaatcatcataattgaaacctggtgaagttttatttatgacttcttgaattttgggaacttctgttattattggtttctttcctttggttggttcttctttgacataactacgctttacaacatgaacttcctcaagtacctctttgacaaagaaattgtcaggtattttatcaacgtattcaatttgtattggtgttatgctagtattttcatttttattttcatttttagtaatgctattcactttagaaacctcttcagtgttcctaacttcatcacgtacatttattggctctattttagctttcttagcgactttttcacctaatgattcaataatgccattttcagtcaacaattcttgattattcggttctattttcaatgctgaacttattgtacttttagctgaatctatattacctaaatttctcaaagctattgcctttctccaaagtaatttaacaattattttcttatttgaattgttagatgaatcagataacgataaaccttgatcacaatctttcactgcattttgccaactttcaagttttaaaaaagttgcagctctatttgagtaaagtatggaattgtttcgattgagcactatagcttccgtatactctgttaatgcagatatataatcttgattactgaaatactcatttcctaatcctttatgtacttcagagtcttcaagggtcattagtttaaagaagaaatagaattatacttaaaggtttgaaaaatttcggtgttaagtgagcaacaagacattcaatgacttttcattactgaatcatattctttttgtcgatactttgtctataaggcaagataatgactgaaagtgaagatttggaattagaggttggtgctattgaagcaatatacccggaatgtattgaaaaattagggccggggatatataagttcaaagttccacaacatgaacatattacatttcaaatgtcatttccagttgagtatcctgatgagaaaccatatattctagatgttatatctgaaaagaatggatttgatgaaaagtatttaatggagttatttcaagaagttttagattcaatctatacggagggtgttgttataatttttgatttatttacggagttagatgccgtattatatactggagagaatgaagaacaagaaatcttagatgatgaagatcattggaatgatgccgataatgaagttaatgaaataacggaacaaatcgagaatcttgaagttgttgaagatgaggataaagattacacagattataaatatgatgaaaatgaagagctggctaaaatgaacaataagaagtcatctaacaagaaaatacagaataatgataacaaaaagactaaaaatccattagacggatggataataagtgatgcaattacagataggaaatccacatttgttgcatttgctaaagaagttcattcagttgatgaagcatttgaaagtttatcacaattaatggaagataagaaatgtagaagagccaatcatgcaatgagagcatggagaattaaagataaatcaagtggagctcaatatcaagattgctgatgatgatggagaaactgcagcaggtggtagaatgcttacatttaatgacaattatggatgcttgggatgttatggttgtttgttgcagatggtttggaggtgttcatattggaccagatagattcaaacatattaatagtgcaacgagagatgcattgataaagggagaatttgttcaagttgataatagtaatggtaacaaaaagtcaaagaagaagaaataatcacattgctattgtcattgcaatgtataattgtttaaaattttatagatctattatattacagtttaataattaaaaatgctatacgtttacatgtatgcttagtattcatgaatcaattaccctttttccacatattaagtaagtctttggaagttaaatcatcaccatcagaattatcttgatcatcactaccatttttagttttgaaagctttcataacatttttacttttcttgctcttcttactcttcttcaatttcttagactttgatgatttttcatcatcttcaatatcatcatcattagtattgttatatgattgatcctcattcttattcttaacagctatagcagttaacacatgcttggatgcatcttcatcttctttatttcccataacttttctcccaagagcaacatgattaacgggtccaatactattgatagttgcgtaaccaactttcctgtattttaacattctttgctttgataacttttagagttttaccattaactgggagactccattcacttagatcttttatcttctttatttgttccttctccgaagattcctttgcatcttttcgttttttgttatctgcactctgcataaacttcatgttcttgactctactcgataacgcatcacccatgctgtctgttgtgtatgtattaaatgaataaagatctttaaaagaattaaattgaagggttaaaactttcatgcagagaaataaaaataaatttttcagattacgtaatttttcatataataacatgaaaaaaatatttcattgaaattattaaaattttttttcttttacaaatttaagctggaaactgttagaagtgttcactatttctttatagaaacaaaggaaggaagtcttaattagtgtcaggaagtgatgaagagtgatttcaagtttagcaatcttttgggaactgtttatagacaggggaacgttgtcttttcaccagatggaactactttattatcacctgttggtaacagagtttcagttttcgatctaattcacaataaatctttcacatttaattatgaacatcgaaaaaatattgcagctattgcacttaatcctcagggaactttgatgattagtgttgatgaagatggacgtgcaattcttgtaaattttaaagctagaacagctttacatcattttaattttaaaaatcaagttaaatcaattgaattttcaccagatggtactcattttgctttaggtgcaggtagatttgttgaagtttggaaaactccagatttagcagaggatagacaatttgctccatttgttagatatcgtgtctatgcaggtcattataatgatataactgctatttcatggtcaaatgattcaagatttattttatctgcaagtaaagatatgacagcaagaatcttttcattacactcagaggataaacatgttaaaatgtcattagcaggtcataaagattatgttgttaaagcattctttgattcaactcaggaattgatttatacagtttcaaaagatggtgctatatttagatgggaatatacagaaagaccaggtgaggaagatttagatgatgaacagaaaactttaagttggagaattattgctagaaatttcttcaattcacaatcatctgttaaatgttgtacattccatccaaaatcaaatttatttattgttggttttggaaatggtgaatttagattatatgaaatgccatcattttcattgattcaacaattatcaatgggttcaaatagtgtttcaacaatttcaattaatccttcaggtgaatggattgcatttggttcaaaagatttaggccaattattagtttatgaatggcaatcagaatcttatattttaagacaacaaggacattttgattcctatgaatgcgcttgcatattcaccagatggttcaagaattgtaactgctgctgatgatggtaaaattaaaatttgggatataatgtcaggtttctgtttagctacatttgatgaacatcaatcatcagttacaggtattgcatttgctaagagaggacaagttatgttttcatcatcattagatggtacagttagagcatgggatttaattcgttttagaaattttagaactttcacttcaacaagtcgaattcaattttcatcggttgcagttgatccaagtggtgaaattgttgttgccggttcattggataattttgatattcaagtttggtcagttcaaacatcacaattattagatcaattatctggtcatgaaggtccaatatcttgtttaagttttggtactgaagcaaatgcaaaacttgcaagtgcatcatgggataaaactgttagaatttgggatatttttggtagaagtcaatctggtgaaccatttgatttaacttctgaatgtttatcattagcaatgagaccagactctaaggaagttgcagtttcaacaatggatggtaaaattgcatttttcgatattgaaaatgctagaatggttagagaaattgatggtagaaaagatattgtacaaggtagatatagagaagatgaattttcaagtgaaaattcaaaacgtggtaaacattttgatacaattgcatatagttttgatggtttaacattaattcgcagcaggtaataataatagtatatgtatgtatgatttaccaaatgaggttttattgaaaagatttaaaatatctcttaatatgcaattgaatggtacattagaatatttaaattctaaaaatatagttgatggtcaagcagttgatttagttgatagatcaggtgaaatatcagatagtgaagaaaatcataaatcagatttagttttaccaggttcacatcgtggtgatattggattaagatcaacaagacctgaaattcgtgttatgagtgttgggattttcaccaactgctaatgcatttgctgctgcttcaactgaaggtttattaatttattcggttgatgattcaatgattttcgatccaattgatttagatattgatgttacaccagagaatacaattcaatgtataacagactggtgaatatttaaatgcaattgcaatggcttttagacttaatgaaacttatttaattcataaagtttatgaatctataaagaaggaaaatattaaactagttgcaaatgatttaccaactatttatgtttcaagattacttgaatttattggtaatattgcaatggatagtgcacatgttgaatttaatttattatggatcgaatctttaatcactgcacatggtaaatatattactaaaaataaacacatatttgcaaaaggtttaagatcaatacagaggttccttactagaattgttaaagaagtagtgagttatggttataaggttaattatttgaatgaattcttactcgtctcaattgatacatcagctattaatttgaataaagatgaagatgaagatgtgataattgaagatgtgaacgaagatgagcaaatggatgttgattcagacaaagaggacgaacaagaagaggatgatgatgacgaagaagggtggtttggaccaaatgatgaaggtaaaaaatacattgataatttttcaaattcagacagtgaagaagaagaagatgatgatgaggaagaagaataatagtggttatgtattagatactctatagaatatatcaatagttttgtacattttataaataaagaaaaaagttagactaaaaattgtaaatatcaatgattagccttaacggcacgtcaaaaattttttttgagtgaaaagttgataatccttcgattcatgttaatttagtgatttttcttgattaagaaccacagttcagcttataaatgtactacagaatcagaagttaaattgttagtagcaagttaaatcttatctggaaactggaaagggtgatgcaagtcaattaatcagtgatataggtgagattgttcaaatgacatctaaaatgatgtcaagtgataatatgtgggaatatacagtcgaattatgtgaatgtgatgaaatttggaatttacttgatgagctgaccataattgcatataataaacaaattaagttttcaattaatcaattaagaatattaaaaggtataattttaatgattagaaatctttcaattgcatatagggagaaaacatgataatatttctaaatttagtcatgaacataatgatttagttattaaattaagtgattatctctgtgaaacatatattgaaaccgaggatgatgaaactgttagatttaaagcattagatgtttcagttgtttgtttccattgtgtatttaattttatgaaaacttctaaaggtagagatgaaagtttagtaaggaaaagtatgaaaatgttgaatctgattataatgaagatgggagaaattggagggaagtttgaacttatgcaaatattaccacaatttaaagctttttgtatgattgaagaaactagaaatgaaattaaacagaatgattgtgaagtatttattaatctattacagacaatgtcaaaaatattgaaaattacagttgatataaatatggaaaaattacaagattatgaaactgatgaatataaaatgattctattattagtcacattcattatattatttatttgaagatgaacaaattggaattgaagtttataaacttgaaaaatataatcctgaaaaatatgaaaattcagttttactttatttaatttcatgtcaaatattatttagtaaacaacatttatctgaaaagaatgattatgttgcattaggtgctatatttttagatttctttaatattttgaaacgtgaagtatgttctgttttaaaagataagaatattgatgaattgaaaaaacaaaagttaaaagtttatcatcgtaaaatgattgcaacattggatataataactagtttattgccatatgaattattcaagaaaactctgaattcatatgatttctccaagagttagttgatttctttcatatagttgaacaaaacacacaaagaaaaagacttaaagatgttgaaaatgaagctaagttagagaacaaagaagataaaaatggagagaaaaaagaatttggatcaatcaagacaataattgttgaagtgattacatatttaattcataacgataagaagaatcaagatattgtacgagatcgtgatggtttagtcttattattaaacaattgtaatcttgatgttaatgaaccatttattagagaacgatgtattttatgtctaaaatatttacttgagaacaatcctgaaaatcaatcatttattgctaatctagaaactaagggaattgagatagataaagagaaggaagccgttcttgagaaatgtggatatgaagttgaaattgttgatggtaaagttcaattaaagaagaattaaaagttacttaattatttggatagttacagtaaattgatttgtaataataatataacacgtgttgctatgtaaataataaacaacagtgggaatggtatgaacggaatgattgtagtaattgtaataacaagacggaaataagctttgacatgaataaactccaactgtcatcttaatttgattactaatattttgaaagcataaaaaggatctaatatccccccaatatctatattaaatgccaatctaatgtttattctataattagacaacacttaatatacaattaaagagacacaatggtttggggaaaagtttatatgagaccaggtactttcagatccaattggattacggatttaggtaatatgttggattagagattgaaagtattgatacacaaactgttcctaattataaggatattttcccattaggtaaaacaccagctttagtaactgaagatggatttcaaattaacagaaacaatttcgatttacttatatgttattaagaattcaaccaaacctgaatttgctggtattgaattgaatgaaaaagcaactaatttaaaatggttattatttttcaacagtgattttattagtgcaggtattcaagtattatggggatctacagaagaggaaaaggctaaaggacatgaaaaggttcaatcatatatagattattttgataatgaattaaagaatagagatacaaagtatttatcaagtgatgagatattagttggtgatatctttgtctataagtttttcaaacaatttgaagaatttggtctttccattgaagagaaggaacacattggttcataccttgaatcactcaaggaacatccattgattgcttctaagtagatatgataaatcatttataatcttgtatatataatcgtgtatatcgtttaaagtttaatgaattgataacaaatataagagtatggagataaaaacacggggattataaaagtggaacaatagaaagtttctgctaccaaagaatgattgattaatgattatagtaattctcgtatatcagtatcaagagaaacattattgttaaggaatagtggcatttgcaacatttcaatacaaatcatactagagcaaactggatcaatgatttaggtaattgtatcgtagtaagtattgacggtattagtttttatacagttgataactacaatgaaattttcccattaagtaaatatctagttcttatcactagtaatggatttgaacttactgaaacaatagcaatataaacagcgctacaggtgaagaaattataaatctgaagagatccattttcttagctgaaaaatttccatttttgttcacttgacgttatagtggaaaaaatttttttttttctatttctaatttttcagtaactgatattatataatttttcttatcttattttattttaggttttcgaatacattttagatattatactaatagaatacttgattaccatcattaaacaaaacaatggcagggaagggaagagagactagtactacggcaagtgtggatttgaccaaagctttaatgcatggaagttcaggtattaaaaagaaacttagagatattaagagacttttaagtagagataatttacctgcagatgttaaaattgctaatgagagagcattgaaaacattaactttagaacttaataaagtacagaacgatcaacgtgtaaaattgaatgctcaaagatatcataaagttcgatttttcgaaaagaagaaagctgtaagattttataaaaaatctttgaaaactgttaatgaattagaatcagaacttttaatatcagaaaaatcagtaacaaaaatagaaaatgcagatacagatgcagatgcagatgcagaaaatcaatctagtgaaactaatgtaaggagtgtaaaagaattaaagaaattattaaagaaagaaaaacgtattttagaacattgtaaaatagatttaggttatattttaaatttcccaaaaggtgaaaaatatatatcattatatgctaaaaactgaaacttctaattttaaggatatgtcaagaaaggcaattgaaggtttaaagaaaacaaatgcaaagagagaagaaattaagaaaatgattgcagataaattatcaaagaatgaacttgaatttacaattgaaaatgaaataaatggtaataataatgttccaaagagtaagaatagtacgaataatggaactacaactgctaatgttgatgatgttgaagaaactgaaaataaagaaaataatgaaggagaagaggacgatttctttgaaagttaatagaattagattcaaatttatttcaatcactgtacattacacaattttataaacttttttatgtcatttcatcatttatttataaaatccatgatatcatagtttacaatacacatctatatctataaattaaagtaaataggaaaacctctttcgtttttttcttttctaattcagtggtaaaatttctgtatctaagtatttaacaaattgaagattatttgaatcaattgaatctttttcaattaatccaaattgaatcatatcaccaatgaaaactcccattttacccaatgcatattttaaatgatcaaattcatcatctaatgtaggttctaaaaattcttcatcactactatcaccagcattatcattatcattattgttattgctatcagacatcggacatcatccttaattttatatgtttcaccatttggaccgaattcaaaattttcatcctctgtagatttagaattgcttatatttttagaaattgaacctttgctaataattgcccataatgtccaaaaaattgaagatgttgaacgccaataaatacattcattatataaatttattacattatgaggtaaatcagttagtttcaatgaaacgacagaatgtgaacgttgatttaatgatgcactgtgtgaatttgtggaatttgaatttgaattggttgtatttgaagtagtgtttgaacttgaagaagttggaaccaaattcggtgttgctaaaccaggtacatattgaacataagaatttaataaattaattctttcctcaaatgaaggatattttgattcatcagttttataattctcagttgggtgatgataatcatacatccattcagagaaatgatttgcaatatcataagctggagggtttgcaccggcatattcaaaatcaattactgttaatcttgtatcatatttaaaatttgtatccgttacaacaggtaattgatgattattattgattgaatttgataataaagaattagttgaagtagaaatattattaagattaagagctgaaaatgaattatttaatgataaattagtaatttcattatcatcaactaaattatttggatctaataaatcatcatcatcattcattgataaagcatcagatttactataaaatagtaaattaccatattgagcatcattatgacaaaattttaatgaatttttcaatgaatcgattgaaccatagcttgaataaagccaatttttatattttaaaatcaattttttcaaactttcccaattaataatgaagacatcagtttgctcatcaacagtaggaattttcaataagtttgtcaactaatagaatccatttttcaattaataaccaagattttgggaccattattaaattcatcataagttaaatcaacaccattatgaaattctttcattcttcttgcaatcattctactaattttggaatccctaatttgagatttattcaaagtaattgaattatttaaaaattcttcaaatctaccattattaaaacaacctaataattttggaccgatattttttttagataatctaattaaagtttgtaattctgagtctctatcaataatattttcaacatcaccataaattcttaatagaaggggataaaagttaccataagataatttataaacacaattagtcattgcaccagagattctctctaattgcattaatttataatttgatttatcaattttcctccatttaggtattttcaaagattttataacggataaaatattttgtttaaaataatcaattggtaaagaattatctaaattaacatttagtattaaatctttaagtgatatttcatcagttaaatgtcgattatgattatgattatgactatgattatgactatgattatgaacatgattatgattatgattgtgattatgggtattatattttgaagataatgggagtaaagaaggtgttaaagaatgatttatagttgatgcagtagtagaggaagaatttccattaccgttcccattgatactaccactaacaattccatttttattatcacttctacttctacttctacttctactcctacttctactccgacttctacttctaccagaatctgaattaatattgggagttaatttaagatcaattgaagaatctggatttatattaatattaattgaagaatttgaatttttggatctacctcttaattgaggtcttcttggagataaaaccggtgaagaagtagaagaggatagtcgtcttctaaatactggtctatccattgagtttagtttacaattggaagaaacaattaaaagaaaaaataaaaaaaagatgatgccttcttgaaatcgatgttcaacgcccttgtctaatataagccctttgagtgagaggatttgctcaataatttatctttcgatggtcaattttcacatgcattggatttttaaatattttcagtcacgtgacaatatatcacgtgacatttttttcttaaaaaataaatttatgacgtaatcattaaagttaaaatttaataataataataacacgttaactaaacgttaaagttgctttatcgattgtgtactttactttacttatcttatgtaccttgctttatcaatagatattatactatattatataactctgtactcaattgacttagtatagtgttaaaaaagactcattctttgctaattttagtattttaataggtataatacaataatatcacaataccataataataattcataactataacagagccttcactgtataaatcaaatcaaacgaatagagagagggcaaaccgtttaattataccttaattgaggaaaatcaaaaaaattgaaaatacttcgcgaatattaccgctttaggcaataagtcaaatatttaaactttctcgccagtttccacttattttaatttcaatttttaatttcaatttgaaaaaataaaaaatattttttttaccttaaagtcaacacattaacggtcagctttttttttaccttgggaatattacacttaatctttacttttacatcaataaactgtatcactaagagaaatcactaaagggttatcacatcatccccttctttgagttttttccttccattaactatattatagtttccattcattaatacatcatattacttttagaatttaataccatactcaaataattcaaaaaatataataatctaactaaagtcactccttaataaattgtatctacaactacaactacacttacactcacatatatatagatagataaaatataccaaatcaaataataatagtattaatagatattcaatcatgtacaaaaatcaaactcaaaatcaaggtcaacaacaaaatcaagaaaaacattcttctgatgataaacttatagtttcattctctttaccttatcaatatattaaaaaacctttaaatacttatcatgaatctcttatattatctaactggagagtagatgatactaataatggtaatcataattctaacttaaattcaaataataatattccagcggaaaataatttgatttatgataatcttttagctttaaggaatataattaagcaaattaatgaatcatatgctacttatggtataattacaatcttaaatgaattcaaactttcctataataaaattataatatcaattattggtacaaatcaatttaaaaatgaaattaatgatataaaattaaatattttacaaaatttctctcaaattagtaaatcaattattaaaattaataaatttaataatcaatattgttttgttaatgatagtatttcaaatattgtttcaaatgaattaaaattagatttattaaattttataacaaatgtttcaaattttaataaatgttcaatatttattgaagaaactaattcaaatgataatgaaaataattcaattattacttatgaaatctcaataattggttttaaagatcaagttaaagttacagaaaataaaatcaatctgtttattgatgatatgaatccacaaatcttttcagattatttagaattaagttcaatttcaattttaccattaatttgtggtactaatttatcaactttaagaagaatcattcaacaaactaattgtaatatttatttaccaaatttattacctgaactttattataataattcactgaatgttgaactaaataatcctaaaatattcttaacaggtataagatgtcatgttttattagctaaaaaatggttatctgatttaattttaaattatacttcaaatcctttcattaaacaagttacaatattaccagtcaagagagaatatttgattttagatcaaatattatcaaataatggtgaattctttgataatttaatgttccaatcatcttgttatttatctttaccttctttaggttcaaaattttcaaatacttcaactatcatggctaatctaaattctccatcaaatccaaattcaaattcaaatgtaaatcaattatccaatcctagctcagcttcttcaaatacgtcaccttcatcaccaatatcaaataattttgattcattatcttcaattaatacatcaacatcttcacttaatattaatttaaatcaaaaaaataataatcataacattaataacaccaacaataacaataaactaataatggctaataaaaattcgatagttggtgatattttaacaattcaaggtaattcaaccgaagaaattgaaaatttattaaatgagttaacaaataaggtttcaacttattattcagaaaaaattgaatttgtattaaacaataatgatcatattgttgacataaacaaacttttaaattttaatgattcactagttttcaattcaaattgtacaattacatgtttgaaagtcgataataaatatattttccaaattttaggtaattcagataatattaaaattgcaactaattatttaaatcaatttagttcatttattaactgagcaatttaaatcaacatttgttcaatatcaaatagaattgccaaataaggaaaaagatttcattgcaggtaaaaagaatggtaaaattattaaaattatcaatatgtcatcagtttcaattaaattattaccatttaccgaatcaaattttatagttgatatatcaggtaatgatttattagattcaattttaggtttaggattatttgaagatgaattaccaacaatttataactttaatgtcccagaaagtttccatagacaaattattggtgttggaggtcaaacgattcaaataattatgagaaaatttaatgtttttgttaaattttcaaattcttttgaattgaatgataaaagtttagataataataataataacaataataataataacaatagtaataataacaatatgacaatgaataacaatagtaaccaaaataatctacaatcaacaaatttccaacaatctttcataagaaagaataatgttattattaagtgtccatcaaagaataagtctgaaattccattagctaaaaaagaattagagaaattagttgataaagttaagagaaataattattcatgtttaattgttaaattattattgagtgattggaaattattaacatcaacagaatttaatttattatttaatactaatagaaagaaaccaactaatttcattactgaattagagaaaaagactaatacatttattaattatccaccattagattcaattaataataatcaagattttatcgttttagagatatatggtattgaaaataattctaaaatgtgttgtttagaattgagtaaattattaccatatatttattcatttaaaatatccaatgataatgaagataaattaaaattgatcaaattaaacgaaattttgaaaagtaataataataataagaataagaatgaacaatttagtttattacaattaaatttcttaaacaatattgttataccattaaaactattatacgatattgaagttgatatcaaaactgatgacagtaatttaatcaatttacattattttccaaattcatttggagtttcaatgaatgttaataatcctgaaagattcaatgaagaaattcaaagaaatttaacaaaatctgtgccatttttccagataatcaatggtatgcataaatttctcaatgattggtcgatgaacttgatcatgtgaagatatcttaaatacggaaatatacacagaagatttaggttacaaacaccagaactattggtgagatatttataaatacaacatacttatacttagacatttagagaaatagatttacgtaacaattattatatagcttttttaacttaatagagacacaccatgtaatttttatttcatcgattataggtcaagattaaagacagtgactttcttatgaacagcaatgagtacactgttattacccaatccatgtttactagggattgtctttaccattgcaacacacgatggtaatcatgttgtgtttcattatccacccaagcctaaaaaagtggatattaatataacaccactggatgaagatacggaaagtgatagcgatgaagatatcgatgatatcaacagtaatttaaaagaaggggatgaaagtgaagatggtgatgatgaagatggtgataaattgttttcatttgataaaggtttcattgcagatttagcaacaccacctaaacaactgtgtaatacaagatttgaattaactgttgaagatactgttttcttaggtatgccaattcatattaatgatgatggcacatggaggaaaacaaccaaacgaagaggaactattgatgggcatgaagatgacgaagatgaacaagaggtagatggtgaacatcagcaaaaaaagagtgaaaggaaaagagagaaagaggttaaaaaggataagaatttaagtggcagaatgtatcaatttcatatgatgtttgttatggatccaccagttgttgaatacaatcatagaattgatgaaatgtttcattatatcataagtcgaatatcattgttattaagatatgaacaacaaaaaaatggatatgtttggactgaatgtgagaaattattaagtaatgatgaaaatgtaactgatccaacatcaatatcatcattagcaagacttattaaggatacctatgataatgttatacgatctgagattgttaatattgaaatcaatggtaaaactaattcatttcaaattccattgaggaaagaattccctgatttaccacatgtaccagttcctgagagatctacattatctagtatttcaccgataacaaatgggggtgattcaacattacgatatttttcattaattttactggataatgttgaagatattataagagatatcagagcagagagagattcattaattgcaggatttgttcgaatgattagaccaaatgaatcacttgctaaactttcagttttaagtggattagatattgctgaagttcaattatttgcaactcatctggtttattggagacgtgcagttgcagttttaccattaagcccaagaaatacgtatgttatatcaccattagctccaatgaataaaatatttacagatgcagatgcatttaataaaacattccctaatttaccatcattacaaacatttttagcaataatatctgatgcatctagtaaaaaacctaaggcaattggacatgttataccaactaaggatcatagagaactgtatatggaagcaatttcatggttattaaggtatggatatattattcaattatgtacatttgcatatgttaaaataacgagtcaaattcaaatgcaagtagctgaagagatggaaattgaatttaagaaaagagatgttaaaagagttttcaaatttaatgaagaagaggaggatgtcattattttacaaccacaatatgcatcatcacttgagagaagatggattacaaagattgtggaaggtttaccaagtgaaattgttggattattttatcggatattaccacatttaaatggtaaagatccattggagatagttctattacaagagaaaatgagtcgacatgaatggaaacgactatgcgatgccttacagggtgtcatcatcattgtaagacactggtaatatgctacctaaactgtataaaacgtgtaataaaccgtactgttaatattatatatccgactgaaactcaaacatcccattcgtttctctctcactataatagtaaaaattaaaatattttttttctctctgtttatcaacagatcacaatttcaatttcaattattatttaatttattatattagtaagtgcattttataccatttgaattatcatcttttcttcttttgatcactttattaattcaaagaagggatgaagatgaggctgtcgaggcaagcattggcagggaaaatgcgtcccatcaataatctcacgtcaacaaatacagcttattttcgtgtaatgatcttgtttgcaattcttcaaacaattgcattaactttctttacgagaggtttcttactttcaagaaatgttttacctgatttagcaacttgtccaaatcaacaatctgaaattctatctaaattagggaaatcttctaaatatatttcaaattcttcaaatgattcttgtttccatccatctccatttaagaaaactgtcattttagtaattgatgctttaagatttgattttacaatacccaatcctaataccgctccatatcttaataacttcccaatattttatgatacttttactaacaattctgaaaatgctttactactgaaatttttagctgatccaccaactacaacccttcaacgtcttaaaggtttatcaactggttctttaccaacttttattgacgctggatcaaattttgatggtgactacagtttgggaagataacctcttaagtcaattctatcatcataataaatcaatcgccttcactgggtgatgatacttggactgcaatgttctctcctttcattaactcttcaatttgttatccctatgattcattaaatgtttgggatttacattctgttgataatggtgttattgaaaatatattcccattattagaggaacaagaatcttgggatgtcttagttggtcatttcttaggtgttgatcattgtggtcatagatatggtcctgatcattatgcaatgaaacaaaaattattacagctgaatgatattgttgaacaagttatgcaaaaaatctcagatgatactttacttattgtttttggagatcatggaatggattcaactggtaatcacggtggtgaatccaaagatgaaattgaagctgctttattcatgtattctaaacaaccattctttaaacattttgatgatccagataattcaatttataatatttcaaatggtggtgaaaattataggcatgttaatcaaattgatataactccaacaattgcaatgcttttaggtattccaattccattcaataatttaggttcaccaattgctgaagcatttcaaggtgataaaacaggttattcaattgcttccatgcttacgtcatctcagatcaataattatagattaacttcaaatgaattacgagatgatgaattattaaatgaaaaataccaaacaatttgggataaatggtctgaagaaatactaaatgaaaattatcaaaaaatttgggagcaatggtcaaaaataaaatcaaaatcagaatcaaattctttattgatagatgataattataactatcaattatcttcattacaaaaatgtaaagaaaaatgggctaattttgacgatttgaatatttggattggtattatattattattcatatcattagttgttcttataatttattcaaagcttgtaccatcagttgtcgtttatcaattaaataatcaatgcttaatggggtcatttattctcacttctggtttattgtgcattatcaacagcattttcaattgtattcaagcctcaaggattaacaatcaattgggctctattactaggtgttgcattaggtatttcaaatggtatcttggctccaattatggatagatattcacttttctggttattacttcaaattagagaaaatttagtacaaaatggttggacttatactggtatgttaataatatttttacattcattaatctttacttccaattctttcattatttgggaagataaaatagtttcattttggttaacaacatttggtttcttagcattctttaaatcattccaacaaaatgaagaccataaaaaatatcttggtgcatatcattcatttatgttcatgttatttacacgactaacttccttaatcacatcatgtagagaggaacaaggtggtaagtgtgtctccaattttaaaatatcttggtggtcaattgttttactttacatttccgcaattgtattgccatatattataaaatcattctataatgtatcatattcttatcaaggagctgcatcactttggattggtaaagcttttagaagcgtcctgtttttaattgccattctattggacattagagtatattgaaaacgatgaaattatcacagcatacctttatattccattcaccaaaggtgccaaacttactattgcaagaactgctattggaatttcattatttgtaggtacaattggttggacaggtggtccattctgtgtcaaagttgatttatcagaaactgaagtcttggatccaaatccttcaaagataaaaaagaaatcacaagcagttaaatcaacagaaatacagaaagttgctaaaatactgggttatggtaatgtttatggttcatcatatttccttttctttctcaatatttttgctgctgtaatgcttgtatctaaaccattgggtggactttctttattctttcttgttaatcaacttttgacattatttgaattagttgatattttaaatataagaacaaatttagtttcagttgtggtgatgactttattaggttatttacatttctttaccactggacatcaagcaacattgcaatctattcaatgggaaactggatttatgttcacagaaacaatttcttttccattcactcatttagctattattttgaatacattaggtccattcatcttaatcgcagttgcaattccattattggtaatatggaaaattcctccaactaaaaagccaattacattatgttctaaaatagtggagaattcaatgactgtattgatttatcaaactatattaactttggttacacttgttatgaccaaccatttaagaagacatttaatggtttggaagatttttgcaccaagattcatgctcaacgcattgattttattcctattcaatataattttaacatttatatctgttggatattcaagtgtgaatgctgttcttagatggtatcaagtgtttggtacaaggtagagcagttatttaacttttttgcaacaaaagtacattttaattttcttagtaattattaataatacataatcttatttattctacatattcaaaaacacttcattcgtaagagatccgaaatctccatcatcatcattatcgaatgcttgttgaccatataacatactgctatcagtgaacattgtctgtggtggttgtggctgcgatgatggctgcattggtatttgttgttgtatttgttgttgtatttgttgttgtatttgtatttgtgattgtggaacaggaacgaactttcctagcattgtattcctctaatgtaactacctcttttaactggatcaaatgcatttgtttcaaattgtttaattttctctgactctacgtattttcttttaaatttattgtttaactccttttcaatgtctatcaattgcttttcacaatcatcaattgacccagcagtgaatttattaatcatattatgtaattcatctactttattcatactgtaattgtacatttcacccatttccaatttggttacaggtgttgagtttgcatcatctgccaaatttttctctagcattttcatggtttgcaaatcaccgaataagaaatctgtcggttgttttgccaacactcgttcttgaacatacctttctaatacttcacgttcctgttcagacagttcccgtttagcacgttctttaccatctttaccgattggggtttcattttttgtaaaattttccaataaaaaagcctttttcttctcaaatggaactccttcaacaaatggcaatgggaataacctaggtggaataattttctcagttggtatagatttcagcataacattgttcaagagttcattgtaaatttgaaattttgacaagaagtgtttacgagggaaatacatatcaacttcatcattcaatatggttggttttaatgtttcatttttaggtattgggaattggaaaactggattaccaccattttttatcttctcaggatctgtatatttagagcttttcaaggaaccttcataactaagttctgttatatttggttcattttgatttgttgaccgctgtaaatcaggatatggttcctgtttatgagcatgcggtttccttcctttcttacgtttcgttataactggcattgtggatgtagtttgtattcagatgtgaagaagaccatagtgttgattaacatgataaattcgagacacggtttttttgttgttaaaagttggaatttttattaattaaagttgtttatatgtggtattgtgttttctttatttgatagagatggatagtaaagctatattggagtcatatttggatagagaactcagtgaagtagtgggagagaaaaggttacacaagatagtagctagtgaattgaaaaaggagttaaatgggaaggaacaagaagctttggttagaattatacagaagagacacgaagaaagtaatatgacacttgtgagagaaaatgtacagaatctaaatcttgttagtgttgtagatacagatccaagtttggaaaatagggggttaaatgacgatgaacaagttaatggttttataatcaggattattacatataaatgaaaaattagagaaagaattggactattccatgaaatctcgtgatagaagagtacaagagcttgatcaattaacgaaaagtttagaagtggatagtacgactgaaacttatgacatacatgatgatatcaaaaagtttattaataataattgaaaacttcaaacgttgatgttttcatcaatatctttaatctgcttaaaaacttcttcatcgatatactgaaatgcttcatatttccaatttaattcacatgatatatggatcatttcactgatgaccacttgtcttacctattccacctgttttcaatgatggcttgatatacaccaatctagatattcttgaatgaagtaatgccatagcacacataacacatggttcatgagtcatatatacatgataattcaaacatagatagttcttctcatttctatcatgtatttgttccacttgtcgacgcttcaattcatttgatgaaatttcattaattgcatccataacgggatgtttgataggattatgtgacgttctttgatcatatgttatagatttggtttcattagttctaggatcgacaaatatgacaattgttggattttcatatttacatgtttgttcattttctttactcaattgtacaagtttgtcaatatgggcatatgtttcagacatattaattgttttgcttaattcgttcatatcttgaatcattggattccctttccaaacaattggccaatactgtttagaccattcatcattaatatctttgtccaatggtttgttcattggtatctgtttcttttctagtacaaatttttcatctataagtttttcgtttatagtggcatgtatactatcgtaagaatttatattatcgttgaattctaatggtgcaatgattatatttaataaatgattacctgaagtgtcagttgttttatacattcttttcaaatgtcgtagatcatctgacgtatactggaactgagtcttaattagtgtaagtattttaggtgaaagtttaggagaaacaagacagatccagtaatcttttaagataggtcgaatatctccagcatcgtggtatattcgttgaagctttctgtaaaatatacctgttttataatcaacatttccactcatcgatctctattatcgatgataagtatatcatacttaacgttaaattcaagatcagttaaatgaaaaattcaaaccttggagaagtatagatcttggtgtgatggtcgattcgtcgatacatgaatagaagacaccacttcctttcatcaatgacatccctgaggaagtatcttcaatcattgatcgagtatgatgaagctaattacattaaatatgaaggtggagtgcatattggagagattaatcgagtactggatgagatattggtagaaccaaatacagaaatcaaacagatcccttcaattctagtatctaaagcagagttttgttaccatgttcaaatcattgatttggtgttggaatatatgatcaataaaaacattaataatgttcttttggaaggaatagagagagcagagtatgttacatcttcaaatgcttcaatttatacatttaaaggatacaactcaactataattttattacattccaaagcaatgcaagcaatacgacaagcagattggcaacaaacattttattaatcttctattgaatagtaaatgtgtatttaaatcaactaacttgcttttatggggtgatattaaaccaaaagattttacaaatacaaagaaaaaagaaagatttttatcaataagtcgaatgctacatgttcatcccaatgcactacgaggacgaaccccaataccagaatctagttggaattttatgtttactgttttttacatcaacggtattcctaagacgaaaagaaagaatgatcctcctaaaagatttagaaaagtatataagttagccaaattgctgataagcaaccacaaggaaaatatgttgaaatatccatatatttttgatcaaatatgtcataataatgggaaatcaaaaaattctaacaatctatcacttactgtggataaacatatgattataaagtttgtgatgacaattgtctatatgattttcccattggagttttttggtaccaataagaatcgaacaaaaattatgagaataataccacagctaataaatggaactatttatcaaaaaattgaactagattctgcattaaacaagataaagcttaatgatatatgctggttaaaacccgtgaatgagcttaatatgacaaagttagagtttttaagggctagggacctatttaagtcatttctattttggttcttcaacaacttcatttgtaaacttatttcttcatttttccatgttacagaagcatcacaagatgtaagaccgttatttttcaaacatcatgtttggtctagaattagcaaaaaattcatgtctaaatattttacccgtcatttggtgaatcaaaagataaaaataattcatttaaatcattgaattcaaatattgacatgataggtaaattagcattacaaccgaaaaaatcaagtttcagactaatcgttaaacctttcaaaggtaaccagaatgagaaagctctattttattcatatcaaaagaagatattaagaccaatcaacaagatcttgtttcaaattcgtgataatcaaagctgtaattcactacctgaaattgttaacagagtctatgaattcaaaaatcttatacttaaaaaacattgtaagttacccaccatatatgcttttaaatttgatgttcaaaatgcatacgattctcttccccattcaattattgataaatgtgttagaaatagacttgataattatactgaaaatgatagaatacacactcatttattctatgaaactaaagaatctgagaaattcttcaagaaaagatacgttgtctcagattcattgaaaaatgttacacctccgaaagtaaagaaagccgatgaaattgttatgatagatacgcatcaatcatattcatttactaaagatgaaattatggagtttgtaagatcacaatatatgaaaacttgctttcacaccaaaaatagatcatattatagaaaaataggtgttttccaaggataccctttatctggcacgttatttaatatagtttatgactcctttttaattgagttgaatcaaatgttgaagaaccattcggaaacgaaaattataaggttgatggatgattttttggtcttaagtactgatttagctgttattagatctgttaaaaagcttattgctagatctgttaaagaatttaacttgaatgctaatagactgaaaacagaatttacaacaaaagaaactttatttgcaggtatacatattgatgttgagaatttaatttgctacaaactagtttctcaatacaattgtgctccaatacaagtatctagtttttctaaattatattcaagtttgttgaaatatgcagatatatggattggtaataaggggttatttgatccatcatgtaataacagtgaattgaatggatcgagaaagaatctatcacaattattgaaaagtattctttataaatttgttaattcttataagatggtcaaactaaatgattcttttgatatcaataaattcaatgtattcattaaattgttaattaggaatatagacaaccacatatcattgaaaaaattaaagttcaattctaaactattttattcaggtacatttcgtacattaaaatacaaaggtatattacataaaagtagcaaataaatatatattttacatatcttctttcatatttacaagcttacacaacaccaaattgattgtttctaaactcttcatctttttcttgtctcattttctcaatttcatcaataccacctgtatgtttgaatttttcattggaaacaaaatctcccaattcttcttcaaattcatctttgaattttaattccttttccatttctctaacacgttcagctttctctatagcttcaactctttgctcgtgatttgggttaattgcatcgacttcagccataactagttttgatgcatctaatggtgaaattgaaggatctggtagaggtaattttgatctatttaatgatgttgaattttcaagttgtttggcaatcgatttaatcaattcaaaagtttcttgggcagcttgataatcttgttcaagtaaaccaatgatttcttcttgtgctctgaagaatttttgatcagaagcaattgtagccatttgcttgttccacatcgatgcaatatttttgttctcaatacgtgtaaaatcaacaagtttttctaaatcagcctttgtcttattcatttcttttgatatatgttccaacttcttattacttggtctaattgtatgtttagttatatcacgtttcatgaattcaataacatcttgtaaatcatcgagtttatcaacaagcgattcacatcccccactaactttttgcttgcatgcattaacatatgagttttctgacattgaatttgttgcaacaccagttttgtttaatttttcaactgaagttacagtttgacttaatatatcagtgacacgtttgatagatcttccttgatgtattttgattctattgatctcatcttctaattcgtctataaacttctgttgattgttattcttctcgattttctttttcatatttttctcaaattctaaatcatctgaatttttgaatgaactagcaacattgattgttgaagcaggttgtaaagattgaatattctcaatctttttcaaaattctattttccatattcataatatcatttttcacattatctatttgattttccacatgttgaaaaattgcagtttgaatatcaggttgcttcaaagagatgatatcaccatacttaagttccgatatatcttcaagttcatatctgattgatgcaggattctcttgaatatatattttagggaaagccgttattcctggaggggaatagttaaacttctgagtgaaaagaattttcagattggcaacagttgttggaagttgaatttgaacttttttaacttcatccttcaattgaagatatatgacatcttgcacagattcttttttctttatatatgaaccacttaatgtttctgctgttttatttaatacagatgtttcttcttcttgttccacttttttacctgtttcatttgttttatcttctattaactttgaatttggtttagttctattcatcaaattagtaacaccttttgaatgattgtattgaatcacagtattatcaaaattttcattttcattctcattatttgttgtggcactttcgttctcttcttgtattgtcatggatgaatcaatatcaaacatatttgatgattttttagcattttcaatttcttgtgctgtaatactgggtatggaagagaatgtatctttattttgattttcatctctatttaagctaggtgattgcattgatataatacttgaagtttgataagcggaaaacctcttagaagctcttctcatcagattactattattttgtaatttagaaattaaatcttttgatggtgtatctaatttattgtgttcaggaattagattagggaccgataatttagtacttgaatttggtgtcctaaaagatgatactgatgaagatgccgatagacttccactttttcgtgctgcctcaattgtatttacatcaacttgtttatcctttaacatttgcattaattctgctacagagttacctatttgcggtaaaaatttatcaagtgaagcttgtgaaggttcaagaaccaaattagattctaatacagatctcacttcacctggtatatttggtatatttgaagtatcgactccaaatgccgcatatgaccttttcagtgttttgaatgcatcaccgaatttaacaaatttggatgaaacttcagtgacagaagcatttaattgagcccaatctgtcaatgattgtaacaaagttttagttgctgttaataagtgactcgtagcctgttggtatagatgtgacatgctataaattatgttagtattcgttttttttaaatttatcagatttagattcaagatgatgaaacaaaactaagactaaatgtgaaacattttgaattttcagttgaataatacatacagctcttttcttcaaaggacttctcctcccggattgaccactgagagattccgacatgtgtttgcgcttttagagagtgtttccaagtagtaaacagagaatacaccagatattcaatgtaaaactcaatccttcattccccagttgactgtgtagagttcatgttattctgtaaattttaaataacaaggctcagtagcgtcgatcgtcggtgtttttaattttatttccgttttaggacaaatttcttgtctttcatgttttcttgatggtttcaacaccagggaattaacattgatttattagaaaatactctgtgggatagataaaactaacccgattgatacgagggttttgtgtggaaatggaagaagtttcagattctcagtctgatcccttattagatattgatttatcctgggatacacttaatacagacaaagagaaaagtacgcgtaaagcacatcaacttgatcgattgcgtaaatcattaaaaccgttgacaaatgaatataaagaatcaccaacgacaagagggagaaacacttcatttcagaagaataatcaatttacagtaactgcagccgaatttttgaatttgagtactaaaaatgaattggatcaacttttccaagatggttacaccaagaacgagattgaagatatgttagaaaataaatacgccaaaaagagggaatttttcactgaaaataaggtgaaacaccatcaattcaaaagaaaaacttttgaatcgtggagaagtgtggggtcttcaaacaatttagcaaatgacacatttcttgacgaagaaggattaatctcttctttagataaatctctaaagtttaagctcagaaacataaataaaaaaccgttacgattgtttcgttctaagaaatctaaaagcattcaacatacgaattatagtgaaatacccaaggaaaatggtatattaggctcatccatagatgagaatagtagtttgataatcacaaatgaaaaatctaatatatcaaaaaatgaagtagaaattgttgatagtagtagtgttgtgaacgatgattctaataatgaggacacaagaaactagagagaaaaataaattttatcctgatgaaatacccaacattgaatctcatttagaaacaattgaagaaaacaatgacgaagaaaaaaacgatagtatagaagaaagtattcaagataataatgctggtgaacctccatcggagcattcacaagaacataatatattttcttttcttgaaacgcaaaactcaccaattgaaaaaacaagttttaatatgcaaccatcttcaccatttacgagtaatcaaaaacaactgtttgatgagctagatactgatttgggaactagaacgtccatttaatgaagataaagatttagaacatgtacataatgaatctattgaattaatagacgcttcttccaaccttcaaaatgataatgaaaatgcagtaatggaaatggttgaagccgaattaaagaaacatagaaaagatattaacattccagaagtatttgatgtggtgcacactgaaaattcatttaaagtagtacctgaaaacgaaatcatttcagctagtgggaggcatttacgtcatagaaatattgttaacagaaatccgtatttagttgatagggctgaatatttaggattatcaactagatatgaacttatctcaatggaaaatgaaggtaaatccgatgataacataatgcattatttagatacaaaatatcaaaaacgtcgtgctgaaagacgtgataatgatgttggttatggtccttattccaaagaatcattttataaaattatggatggtatgaatgttttaaatgaaactcaaaataatctggtaggtttgaatgttgatgataactccgatgaagaattttctgtagacgaagaagataatgataatgatctagataatatggataatggatcggaacagggtgaagatgaagaagacgatgaagaagatgatggtaatttagagctctgtaagcatgatatcagtccaattaatgcctataaaactaagtcactgaactctaagagattgaaagataattccaaagatatttctatttctggaaaaaggccaaaaatttccaaagataataacccgaattccaaacgaagcaaatcatccagcaatacactaagaaaaagtcacaatcaaaatgatattcaaatacaagaggatgatcaagtgtttgactttacaatacctaaaataccaaaatcaaaaaaatctattagagatattgtgagttcaacacaaatttcaagaagcacgtccagttttaaaccatattcaatggaatttttaagtttatctgatgaagaagttggtcctttaaataagagtgccaaacaaccatcagttgcgagcttagaatcatctgaattcaaagagagaggtgccaattataaagaacaaaccaagaaactttctgttcaacgttctttaattgataaaaaagttcaaaatgtgaaagaaaataaaacactgccatacaaaagaagttcaccaacagaattgaaatcacctacaaaaaaagccaaaaaagattctaacaaagagaacaaacataaaaagggtgtcattgcaagttcttttgcacctgttaatgatcaaaactttgtattttcaagaagacctaatgttgaaaccattgaggcagaaggtgttgctccaaatattttaaacaataaaatcacaaataatatcccatcgtttgaaatagataatgcaagaaataccaatgtaaatttgcaaacaattacttcaactgatgataaattaccagaaactgaaaatatcactaacaattccgaaactgttgggaattcaattgataaaaattggggaaaatttaaatcaataaaagacattgaagaaaggaaatacaggtttattttatgtttgaaggtcaaccactatacagaattgagtgttccagactcttttcttaattcttcattactaagtaaatgtttatctgaagatcaaacttattatagagctaaagatataaaaatagtgttttcatcatcctcgtttgtattccaagttcctttgaaaagtgaaagcacatattccaaacttcaagcgttttttgatattatgttaggtgctattcaagtagatattatgaatattacggaacttaaacagttaaggaaatgcctcattcatattataatgataatttcaaatgcaaaaaaagattgtcctgatttattaagtaagattgggttagagatcaattcatttttgaacaaattcaaaaagataacagatccaaatgctttatattattgcatatttgcaccatacttccttttgtttgtcaaaatgttacaaaatatgttacctgagttttctgaatattacagtagttttaaaaaaacagaaatctggattactaagaagtttacatcaaatatcatcagtatagattttgaaaatttatttattagaaagaaaacaattgcacttgaatctttgaaattatttttaaaatgcaccaataatccatggatgtatataacagatgcatttgagaaatctgatattaaaattttgaatttggttaattatttaattttttgttcagcttataaaaaagtggaaatggattgggaaatatttaccaaatttcttgtcaagtatgccaacgatattactgaagacagtgaaaagaaatcagaaattaaatacttgtttgcctcaattttaaaaattaatagagaattaggttgggaattggaagatcaattaattgttaaattatttagattattagctgaatataaatttgaaaatattggatcttcagtgtctgataaaccatcaatatatcctaacattccagcaacagactctctagaaactgatgatggatgtttagatatttatttcaagttgattgatatatttgctaagcaatatttgactgaaaacactaaacaaatgattgaaagaattgttcctgttagatcaacctttggatattcgccaattcaacttcaaaatagagctaaggtgatattaatgctggtttatatttttgatcaagatttactttcgggccttgaatcgatattgactgatatgataagaaatggttctatttattctatgaaatcagcacttgcattattgagaacaattattagatctacacctagaagaccatataacacagtaagaaatttccttccaagtataattagtaaaatgaaaaacatgaatactgatagagaaatatttgttaactataaagatttaatcattgatgttaattctactttgaatggtcaagatgtttcacacatgaaaagaatgttagattttttttcaattattttgaagctaaagttttcagatacgtattgtgaaactttagaaacggtatataacagctcgtttgatatcatcagaacgcaatttgaatttacaaatggagttgatatcagcaataaagattcatccaggatcaaaaaagccattcatgatatagctaaatattcgaagatgcgattaatagatgaaaagctaagtagtcattcaatgaaattatcatatctaagatattggttattttcatcatcaaaaaataatgacagtgcaatgcaaatactatataccgattggaattattttggaaacaaggaattcagggaaagatttgaagttgaattttttaactatttggtgacgtggtttgatgtttcatctgttattaaggatgttttgatggtattttttaaacatctaacaaattttaactcagatatttttgagttttataatagcatattagaagcagaaattatcactgttagtaaagataaattcaagaatctaaacaaaatgacatttcaacagatgagagaaaaaatcacaattatgtgtttatcacaattatttcaaagtaagcaagaatctcctgaagatattaaattaattattgaagatattgtctctgtactttataaacaattaaatgattatagtgccagagattttatcagaaatatttcattctaccttttcacagttgcagaaaataaaatcgatttaccggaatggaaaattttgatgaataaattaaaaattgaaacgattgcggaatcgttacataaaaaactacagtttgtggaaactgttgatgatatagcattagttttagaaaaaagttatatcagttcacttgcaactaatgaatattcaaaatttgagactcaattcagtaaagttaacaccaataatgaaaattattcaaataataccaaggcaatgtgtgcattaataaccttccatattgaacgtataaaaactgcacatactcttcattggattcattttaccaactggatgcaaaatttagggaactatgtatctgcccactttaatcagccagatatttttgatataatgcacttgttttgtgctcttggggatttgaaatcgatttttattgaaagtgaagaatatcatttctattattaccattcgttaactacattgtacaatttgtttgataaaatagctgcatttatgtttgggtttgctgatcagagcatttttttgaaaaatgcagatattttactgggaatggatcctaataatgatgcacaacgtagtgaaaataaaggtatcaatcattttgatgttttattagataattctttgaaacaacgtttgagtagtttattcgataactcacattcacttttggtaaacaaagtatcatatcaaaacgatggtaaggtgatctcatatatggagaaagagttgaaagtcctgagagttaagatagcaaataaatggggtattgaaagtgttttgggaatagaagaggataccggagtttaaagtgcggaattgaaatttcggagttgatatgaaaaaaggaaccgttaaattttcatgatggctctgtgtttaccttttgcatttcttatatcttgtttctatagcaaaagtaccttgtttattttttctaagaaagttaagtaaaattagacactgtagatgagtaaaaacataccttcattaaacgagaaggtgggtagtgttagaaatcttatctctaattttgagaaatcccatgatgatgatgatggcgaaaaaaaagatatagttgttgaaggtgattccaggggcatcgttaaagaacatcaacatcaaaaaattgaaaatccgtatatagtcacagaggattcaaatatagtcacaaacttacaaaagaatgaggtagtagaacataatgttgatacagatgctgaactaccattgttaaacattgaagaaggatttttagaaagacaaaaagctcaagaaaatgtagattccggatcttcagatcaaatagccaatattttagatgattatgaagattccataaaaaatgcagaaaaggcttccgatgatatcaatcttgtagacttcgatcccattgggaagaaacagtctttcaagggtgttattggtgaatctgctcgtttgattccagaaatagcttctctcaacgacgtttcttcttccttttatgaagacagtataaaaacaacaaagaaaggtgaattagttgaagctaatcaaaagtctgtaagtaatgaagacagtagtgaatggggtgatggtggatctttgattaaaaactttggttatcaatctaattctgctgaatcaaacctttctaatgatgacaacaaaactgtgaagcttgaacctcacatctttatggagaatgagcttttagctgataatatattaggggagcaaacaagtcaacatacacaagaatggaagtatggtgacattgatggtttaaccagattatcggcaaaatcgattgatttggagagagcaggttcgttaagaaatccatttacagatcaggataatgtaattgttgaagattcatcaccaccgggcagcaatggatgatggttttcatagaagacctagtagaacaagatctgtaagcttcaaggaacaaccacaagagatttattttcaagaaaaagattctagtgatggtaaagttgatttcaacccttggaaatatgtttgttacggtttattagctgcaactttatttatctatgtgattacattaacatttaatatgtttttcactaattcaaaaaatgttatcatattagctgaaaaggatataatggaatactttgaaaaaagttctaatcaaactagaaaactattggttttacaattatcagagaaatacaacattttaggtgaatccaaaaagcaaatgaaagaagaaaatggtgacagacaaaagataacatattctcctagagaaaatgattccgatattaaaagtattgttaataattttgaaaatataaatcctaaataccaaaatgatgttgaagttaaaacaatgatgactgaagataatttgaagtttatgttttcaggggtctcatatgcgcctgaaaatgttattgaaccacaatgtggagctaagttgagagatgtaatattagatattgctagattgtcaaaaattactggaactgtcaaaacatatggtacacaatgtaatcaagcagatctaattcttcaagcaattgatgatcttaaagttaatatgacacttgcattaggtgtttggattggtaatgatgaaaatactaatcaacaacaaattgccgatatgcgttctgcactttcaaaatatccaagagaatattttcattcaatttttattggaaatgaagtaatctatagaaatgatagaacaattgaacaattgcttagttatgttaaagaaacaaaagaatatttaaagtcattaaatatcaccaatttacctgttggtacatcagaaataggatctaaaataacatctattatgtttgatgattgtgattttgttggtgcaaatattcatccattcttcggaggtgttgatgcacaatttggaacaagatgggcattagattattactatagtcaattagtaccattaaaaccagctaacaaatccaaatagtaaacttattatatctgaaattggatggccatatcaagggtggtgaatttattagatcaattgcaggaagttgggaatatcaacaatttttaaatgattggttatgtacaacaccggctgaaatattaaatgatgcatttttctttgaagcatttaatgagccatggaagaaaatctggtgggatagtaatagaacatgggagacagaatggggatttttcgatagtaatagatcaatgaaaaagcatgtatacatgccagactgttctaaatatgggaatccatctgccgttgattttgaatatattgaagatgttgaagatccatatgctgatgggaagaatgaagattaaatcaaaaagaatagaggatacattaaaagaaactctttctaaaattttatttgctaaacaaaaattcagtctgattttgcttttaatgaatgtatagtgtatattttaaagtttaaccaaacataaaaaattccaaaggaaattgttgaaagaaatgtatttgaaatttcccaaaaattttcaatttcaacaagtggttgaatttgtaataaatcacatgaaagtataatagtagcagtaacgtaaaaagatataatagtagcagtccaagaataactatggggtaaaacaggagtagcatttggtctttgagagataaatggaataataatattaacaaattttctaacccaacttaaattacccattaaccaattactcaagacacctaagacaaaatattgtaataataatccatcctttttcaacaatggcattaatgaaaacaagcaagtattgaaaaaaccaacaaatcattgaaataacatcagcatcaacttcattaagtaataatgtcactggcatccaaggtaataaaactgaagtttcatcaataagaaatgaaaataagaagaaagataatgaacaagaagctaaacaccatggaagtaatctctttgaagtatttgtgaaaattgcatagcaagatggtgaaattgctaatattgttaatattattgataaatttttcaaatttgataactcaatatttttgtttaataaatgatttgtcattgaccagaaatttggatatgattgatgtaaaatattaaaattcaatgggaaagtagtgtataaaatatgagatagtaattggataccaccagaataaataaatgggagaaatatcacaatgaatgttaataataccgatacaccaatatatatcaaccttataagattaaattttggaacaaagcataatgataaaagataaaagaagaaaattggactatagtataaaaccattggattaaaacatattgcaaaagtgaaaaatattgaagctaaagctaaattatcatataataaattattaagtgcaattaaagcaatacctaataaaaatgaattatattggaaatgaccatgatcaataattgctaaatctggtaagaataaaatagttgcagctatgatagtttgatcgattgaaggtgctttattataatgtctacccatccaacgtgtgtaaatgataactgatggaatataagcaattaattctgaaaataaaacagttattctcataaatgattttaaatcaatatcttgacacccaattgaattatttaattcaaaccatgatttattaattaatttaccaataatcccccaaataaatgaatggatatgcatataatggaggaaattttaacataaaattagaattacccaaatcttgtaaataccattgatataatggtaatgaagtgactatttccatataatgtctattatattcaaaatcaccaaaatttggtggttgattttcaccagaatatgaacctaaaccaactgcacatctaataataattgcaaatgtgacaataatgtatctagcaacccattgatttgcagcttttttgaaaggataaaggaaatcatttaatggagaacctttgaaaagaaatacaaaattatcctttttagttggtttcttctttaactccatgcaatttagttgatgataattgtgttgatcattaagaaatgagtggaggaagtggtgaagagggtcttatatagacaacgcgttgaaagttggcataataaaaattgattgttaagttaagtgactttacttctttctttttcctttgtaaaagtagtacttctaaggtataatgagtaatatggatgggtttaacgttaaagtgaataagggagtttatgaaataactattatagatagtagaagtagaaaggataaaaaaatacgagatattacatgtataaattcattgaatgcatttaacagagccaagaagttgattgagattactactaagaaagacacaataactgaatcagattataaaattgtgctaaataagacaaaccatcatggtagctttgaagatgaagagcttgaagaatttgatggtgaagaatatgatgttgagaatggtgatattgatgaagatgtaacgatagctttagagaatgataaagaacttatagagaaaatgattaaatcattgaaaggagaggaagttgattttgatgaaggaaaggataaagtacgagatgaattgaaggaatctgtgaaaagtacggaaaagagtgtagtagttgatgaaagtaaaggaactgatgaagaagaaaaggatgataaaactgatgatgtggtaatggaagaagaaacagaagaaactagaggaatgtagcatagataattaaattaattcttacacaataatactaattaattaattaacaaaatcttttaaattttcaccattttcaccaataattgatttaatagcatcaattacttgagaatgaacattatttgaagcagcaattacaccttgactatttaaagttctaccataatcaaattttaataaattaccataaatatcagttcaccttaccaccactttcattaactaaaaggaaaccagctgcatgatcccaaattttttctctataatttggatcttttggtaatcttaaataaatttctgcatcaccctttgataaagcacaatattttgcttgagaatcaagattaactgaaggttgttttatatttaatttttctttaattaaattttgtaaactatgagatgaatgagctttttcaacaccttctaaaactcttgcctttgataaatcataatcattatgaacattaattggtgatgatttatttaatgggaatgtaatatctgaattttaaatcttggaaatatgaaccatgacctttaattgcagtaaataatccacctttaggtgaattttctttacgtaaatcatgaggtaaatttggacaaccaattacaccaactttaacatcaccatcaacaattaaagctaaacaaacagcatattgatcacctctaaggaaaccttttgtaccatcaattggatctaaagcccaaattctacccttttgaccaccctgtgaattacctttatcgattgtatcacataaatcatttgaattttcaataatatttaaattttcattattaattgaatctaaattttgaatttcattaacatatttgaaaattaaattcatcaatttttttctcctttaattaaatttgaatcttcctcccctacaacttcatcattggggaaattacttaaaattgatttaattataattgcttgagcaccaaaatcaccaactgtaactggggaactatcagatttatcaatactttgttcatttaagtgttcttcacttactttacaagttaataatgaagctctcttaacggctaattgagcaatataagcttctcttaaataatctgttgacataattaatgggttttgtttagtatataaaaatctacgagatatacaagataatttcattccatcatagaatagttatgtgatcaattcttaatattactctaaaaggcttatattaaccaaattgtattgtatataacagtgaaattttcatgcattctccgtattatagaataattattttctttatagtatatattttcaaattgctaataacacgtgacttatatgaatattagatcacgtgactgtctggtaatcatttcgaattctagtttggtattttgatatttatttaatatctcgtatatctcgtatagtatctcgtataataatattttatcaaggacatgaaatatttcaaatcagtttattaaaagttgatctttaatttcatcttctaatttaatctttaatttcattcctctgatcatcaatgacagtactgaatcctgttactaaaacaacagaatttggtggaccaattggttcattaatcttaattattttcttaccattagttacattattcctattcttagcttgtaatgaaatttatttaatggaaggttttaatcttaatttacaattattaaaagatgcatttaatacttatgtatacaatgatcttaacaacctcctttttgattatcaatcttggaaatattatttatattggtttatttcattagctttacttgatgtttatattccaggtaatgaaaaatttggtattaaattacgtgatggtagtaaattaaaatataatataaatggtttacaattagttagtttattattaattattatatgttcaagattttatctattaggtttcaatttacctgaattaaatttcctttatgataatttcttaaatttaatgttcacaacttgggaattttcaattttattaagttttttcgtttattttacattctttcataccattaagaaataaaaatggtaatggtaatggtaatggtaatggtaattatgaaagaattttaagtattaatggtaattcaaaaaatatcttatttgattggtttattggtagagaattaaatccaagaattggtgattgggatattaaattattttgtgaattaagacctggtttattattatggtttttacttaatttatcttgtttacagagacaatttcaaaaaattggttatattacaaattcaatgattttagttaatttattacaatttatttatataattgatggtgttttaaatgaagaaggttgtttaacaatggttgatattacaactgatggttttggatttatgttagcatttggtgatttatgttgggttccattttgttattgtttacaagcaagatatttaacattaaaagaaattaatttaacaaatttggaaatgttaattataattttattaatgataattggattttatatttttaaagcatcaaataatgaaaaaaataattttagatcaggtaaattatcaaatttaaaatcaattaaaactgaaagaggtacaaaattattaattgaaggttggtggggatttcacaacatattaattattttggtgatatgattaattgcattaagttggtgtttaccaacaaaatttaatacaattttaacatatttttatgtaatttattttacatcattattaattcatagacaaattagggatgatgaaaaatgttttaaaaaatatggtaattcatggattgaatataagaagaaagtaccatataaaattattccatatgtttattaaatataaaaggaattatagagagtataaattttataaaataaaacatcattgtaattttttttcaaaatcaaatggtttatcaaatgaaccataactaatttgcatactgtttaaccaacttaatgcaatagttacaatccaagctaagaaaaggaaaacaattgtacacatccaaataccattagtgaaaaatgaatatttatcaaataatgaaccattaattacctttacaggagttgaagttgaagattttgattttgattctgaatttgattttgattctgaataaatagattacagtatcatgatctaaatcttcattaaataattcattaattgaattaaatgattcctctaattgagattcaatttcttgataattaatttcttcttctcttttatgagatgatttagaataatgtaaaactttttcagattctttattagaattaaatgatttaatatgtgtatttggtaatccttgaataattataaatgaagcatcattgatattattaatgatagtattaatttcattaatattgtaaatatccaattgattaactagatccacaggattgatggatatttaaataattattactgttttcattatcatatacaacattatttgataatgttatgatattattattattattattattattattattattattattattattattattattattaaaatttgagataaattgtgaattatctaaatcagattcctttaatccatgaattcttaaatatagtatactattatcattatcattctcattattattattacaaatattcttagttaatgaattaattgaattatcaattttattaaaatattcaattttattatttaattgtaaatcattattgatatcattatcactgacgattaaaagtggtgaagtattggcaaatgaagaagcagatgatgaagtgataagagaagcaatcaaagctataggatatacgatattaaccattgttaattgacttgaaaagagaaagtttctatctctttaaatgataaacttcttcttctctttaagtatctctaactctctctttacagtacagattatgaatttgttaaggcagccaatttttataaaatttgaattacaaagagtcgatgcgtcggtggtcacgtgatgattacgtaattaagtattattatattattatagtagatagtacataatagatagtagatagtgcatagtggatagtagatgattagaatagatgtatttctatagattaatgttgataatagttactatattattatacaataaaagacctctctatgcaaatgaaacactcttctttttaacacttgcaattgcactcttttcaatttctttctttgctgcctttgcattctttcttctgacatttctagcaacacttgccttctccttaatattacttttaacattctctaatttactcttcttctcattctctctatcctccatttcttgtcttcttaaatctcgtatctcttctaatcttttactcttctctaatttactttcattaactaaatctctatcatcattaatactcttgaattaatctttgtaatgtaacttgaatcatcatcatttataaatttcttacctttctttttacccttcttaacaattacaccggggacaatcgccctatttaattttggtatatttaattccttttcactataaactctctctttcttcttagatccatataattgactactacgtaaatgtttctttaattctttacccttcattgttctcttctcggattttggtgttaattttggttgattttgtaatacatttctagcttgtgaatcagatttaatctactggttcaacttcacgctttttattcatactggtttttctttagctgccttggtttgtttattaatagacatgtttgttatatatacttctatactccttgtctaaaagagataaaagatcaaagatttgatactttaattggaaaaaaaaaattttttacagtgaaaaataaataattttatttaagatattacgtaatctcacacattaaacatcatttcatcacctttgctacctattgaagcaatattatctcttatcaattgcaattgtaacagtttctgacttttagtattcaattgaacatcatcatctaatttcacatcgttattatgaggtgtttctaattgattcatattagtatgttgtataatatcaggtatattatcatctttttcataattatttgatgataatgatgatgattctttatctttatctttatataacatacttaattccatattagcccttgtatcattaactttatttatatatgatttattatcattattattatcatttttatcaactattggtattgaattattcaaaattcttaaatattcttcaatatatgaaattaatgtaggtcgtatatttaaatgatttggtaaatctctctttaatgttttatcttcatataaattatttaataaattttgtaatgtatttgaggaatacatacattctaatttaatattatcaatatcaatttcatttattggtttatctgaactaaatgtttgaccagtattgaggatattcatattcatattgtaatatttgtaaaataattattatctgtttgtaattgactttgttcatcaaatgttttatcattttcattatccaattttcttttcctttatggattttaaattttgaacaaactcttcatgacaattttcattaatacattcttttaatctaaaataattatcaatatattgaattggtttaatattaataaatgtataaagttctcttttatgatataattatgcttgaaatttattttatagttggttaattcaccctttgaatataactttaataataactttttaaaatattgataatcattaatttccattctattcataaaataatcaaatttaactttttcaaataattttatcctatttgataaataatttaattgtaaattcatttgaattattggtataaatttttcaattattttataatctttcaataaatctaactccactaactcattattaattaaagaattaaattttttcaaattaacttcttgataagatttataaatttccaataataaattaattttatcatttttaataaaacctttaaaatcatttgattgaaatggattaatttcattattaattaaaatacttgtaattataaatttaattaataaatctattcttttaatatcaccaaaatcattaaaatttttaaaagaattttgaaaataaatattggcatttaaataatcatgtgaatataatgaaattatacctgaaccatcattaattatacctaatattttagattgtggtatacctgaaattaaattatttgctaatttacaatattttttaagttcacctagaattttataatcatcagatgataatctaagtttttcaattaatattgatattttaaatgcaattatattaatgaaaaatggatcatgattatcaattatctgtgattgtaaattatttaatataattgaagcttcattgaggttatttaaattaattaaattatttgaaatagataattgtaattttatcaaaagtttattataactagtgtcattaaaattttgtaaattatcaaacaatttttgaaatatttgtaaatcaaatgaatcttttgtattcaatctttcaattctattaattattttacttaatgaagatttaaaatatgataaatcaattgaattagtattattaatgaaaatttcaaataatttatcaattaatatgataattttatcaatattatcttcatttaattcataaattttaattaattgtttaattgatttaaattgataagatatattactattatcattaattataatttcaaataatttaattgattcaatgtaattttcatcttcttttaaattctttgattggaaatataatgattcaatatctaaaatttttggctttttacagtgtatatcattatcatcattatcaatgactatattatcatcattatcatcatcattatcatcatcatcaaatgataattcttcatcattttcatcatcatcatacatatcatcttcccaatctgacattttgtcataaaaagggagtgttagatagattagattacacgccataataaaaaattatatgttattttacagtactttacctttaatcatccattatattatagtagttatccaatcattatatagaaagtatacaagtaagtaataggtatactatactatactatactatacatatactatatttgtaaatcatttaaatttaataaaatttctaaatcttttaaatcttgtaaatcttgtaatttttgtaatttttccaattcaattaattcattctgtaattcatcatcatccccttcccttcttcttcataatcagcataataatcttcatcattaaataaagaattaattaaatgattatgaattttatttgattcttttaataattcatattttaatctattatcatcacggacgaagggatagatctaaattatttattatatgattttttcttggttttctattattaatagtatgagtggtattgatatttgaattggtattggtattggtattggtattggtattggtattattatgtatattagaataatgattagaaggtttatgggtataaatatgattatgaggtattgattttaatttatacgtagtattagaaatgttattattattattgttattatcattatcaatatcattatcaatatcaatatctatatctatatcattatcaatatctatattaatatttgaattatttgaaatattagaagtattagaggaagatataataggagacacaaaagagttatcagagggtatacttggagatgtattcattgtatattaaatgagagtataatataataaactgtataaactagctagaattaatggctaattaattatactttggtgtattctaattataattaattcattaacagatttaagagattaaaagactaaaagattaaagtattttgattacgtaatatacatatggtcacgtgataaatgttacgtaatactcaaaacacgtgactaaatttacattacgtaatatttgcttatcacgtgattttagaaatttgcaaaaaatttgaaaaaaaatttaaattttatttgactctgataatagtaatagtaatagtaataataataaatttctcaactgagtcacattaattgaattgacattgaaattatttcacttttcacttgtatgaagggtctttttatctgaatttgttctatctttcatcttttatcttttacttcctttacctaaccaaagatgttctcaagattatctatttctactattaagaaatcttcaattaatgcaattactaaacgtaattatgctttatcaattgaatctaaaaatttaatttcaaaatctgttaaagatgttgatcctgaaatgtataatattttacaattagaaaaggaaagacaaaaaaattcaattactcttattccaagtgaaaattttacttcaaaagctgttatggatttattaggttctgaaatgcaaaataaatattctgaaggttaccctggtgaaagatattatggtggtaatgaatttattgatatggctgaaagtttatgtcaaaagagagctttagaagcttttaatttaaatccaaatgaatggggggttaatgttcaatcattatctggtgctccagctaatttatatgcttattctgctattttaaatgttggtgatagaattatgggtcttgatttacctcatggtggtcatttatctcatggttatcaaacttcaacaactaaaatttcttatatttctaaatatttccaaacaatgccttatagattaaatgaagaaactggtttaatagattatgaaatgttagagaaaactgctattttatttagacctaaaattattgttgcaggtgcttctgcttatgctagaattattgattataaaaaaatgaaatcaattgctgataaagttggggcttatcttttatctgatatggctcatatatcaggtttagtctctgctggtgtaactgattctcctttcccttattctgatatagttacaactacaactcataaatctttaagaggtccaagaggtgcaatgatcttctttagaaaaggtttaaaaaaagttactaaaaagggtaaagaaattcattatgatttagagaaaaaaattaatttctccgttttcccagctcatcaaggtggtccacataatcatacaatttcagctttatcagttgcattaaagcaaactcaatctcctgaatataaacaatatcaaaaagatattatctcaaatgcgactattttcgctaatgcacttaaatcaaaaggttttaaattagtctctgatggtactgatactcatttaattttagttgatttaagaaataaaggtattgatggtgctagagttgaagctattttggaaaaaattaatattgcagcaaataaaaatactgttccaggtgatatttcagctcttttcccttcaggtttaagagttggtactcctgctatgacaactagaggtttccttggtgaagaatttgaaaaagttgcagatttaattgataaagcagttaaaattgcaattgatttaaaatcaaaggaaattggtgaaactccaaaggaaaaattatctaattttaaagaattagcttcaaatgatgaacaagttaaagctttagataaagaagttgtagatttcgtttctaaatatcctgttccaggtgatttctaaagttattaattatgtattttattttataggtattaaatactatatagtaaaactgtattgaataatttttttttcatgtttacctttttcccaaaacgtgcattatgtaaacaccctgcatgttttccattcttttaacctcgtcacattaattcttttatattcgatcctacacttcatttctattccttttaatcatcaaataatgacggttgaatcaaccggtattgatattgttaataatatcaatcaaattaattatcaattgattgataattatatttcaaaaattgaaaaaaatttaaaatctttagatttaagtaaaatagttgatataaatatatcaatacttgatagattagatccaactaatgaatactataatagtatactatcatgtacgttgaaactcgtatcaaattcatcatcgatagaagatttcctattaaattcaaatattcctaacaccgaacaatttattcatttaaaattatttgcattacatcacatttcccttaattcaccttcaccatcacaattagatcaaatagcaaacagtttcaattcatcaacggatatatacaatcaaataatcccccttgcaaaactaaattataaaataatttctatatttcttcaattaagtataaatttgaaaactatacataaattaatattcctaataatagctgcacaatttgcaataagaagtgatgatttccaaatttccttattgaaaaaaattaataaagatggctgtaaaatgtttgataaatcatcaaatttagttcatagaatgtcaaataaatatttttatcaattgacaaaattatgtaataatgaacaactttcattactggatgaattatcaactaaattttcaacaataaagaatactaatgacattgatgaattaattaataaagtacaaaaaatagatttcaatgataatttacaaaatgatcaaataattaaaatacttaataaaacttgtaaaaatttaaataaggataaaaatacacttaaattaattgatttaataacttataaaataaaggatgtttcaattgatgataataatttaaatttcatttatcaatgtttatcaaatttatgtgattatttgaattattcaagatgaagataaaagaattaggtaatttcataaaactattctttcattttgcaaatcattcattagatattgattcaataattagtatgaatttcttccagtattatcttaaattaagaattttcaataatgaatcattagatatcatagtgaagaaaattaattatatttcaattaaagaatatgaaaaattaaatattgaaaattcattgattttacaattactattacttaactctgtgtttaatgaaactccaatctttcaatatgatttcaaatatttttaaaccctatgatatgagcttaaacattctaactaaatgtatcattacaaattttgatgtaataagtatattgtttgaatacataaaagatgaatcattagttatatttattctaatttcaataattgataaattagaatcattaaatacatctcatgaagttttaataagtcaaactataatgatttgcaaagacatgattaaggatactggattatttttctacttcctttccaaaatttcaatgaatttatcattcggtattaatttccaaaacactaatataggaatacctaaaaattcaccagttattggtatatctgggttgataataacacatctgtatctactgcaggatattataccaccagtaaaggactgtattagtaattggatcaataattgtgatgttgtccatacgatatatgaagataatgttattgatagtttatgtgaatattacgcatataattacatggatgatattacatgtgaaatattacaattatacataacaaagagaagaaaatgtattcacatcaatacgattacatcaaatatttaagaaatacattgattcatgtttaaaaactgaacaatattctaaaatcatgaatttaatacaaaaggaaaaactcaaattgaactatgaaacatatgatggaatagaattatccttgaatattgcattaattcaaaaagatatgcaaacagttgataaaattaataaaattttacacaatgatgaaaagtataaattatcgaaaatatctagacaatcatcaattcgtgtattatttatattatctaaactatgtcaaatatgtggatatttaagcaatgataatattaaccaagttgtcaatttaagaagatcaatgtcaatattacaatctattttcaaaaatttcatattggataaatggaaatgtaattgggaatttttaaaacaactgaaaatgaaattctcttatgaaatgcttaattgttattcaaatttaattgagacttattcaaaacttggtatgcagaaggaatttaactattatatcaaagaaatgacagttttcttacaaatacaaacatctgaatcactcaaacatgtttacagtttgaagttagttgattattatatgtatattgatgatattgaaaaggctaaggagataatggattcaatgtcagatattgaaattaataagtttgtgaatatttataaatttattgtatttgaaaattattataggaaaacaaaagattcaaagctaggaaatactatgaaacaattggatgattcaggttaatggtttactcgtatcttcagaattagattattcatggataaaatccatgcatgaatatgcaaaaaatagaagaattgaaaaagtaacacgtaaaactacgtgttatcctatattcaagtgaaacagttcctagaaatagttcaataaatttacaaaactatgataatatgagtactgaaatgtttcaactggggtatgaaaaatcaatcaatgagctactaacaaatatagattctggaactgattgtaatgaagatatttggaatattatcaaatctaatgaaattttcaaaatgaaaggatttcaatatgagaaacaatttgcaacatatgataatagtaagaatttattccctgaaatggacattaaaacaatcaaaccggatatagatttatcattacatattccatctgattggattattgtgaatatagaatatattgaatcgagtaaatcattagttatttggagatatgagaataaatataaaactccattctttattaatttaccaattgaaggatatgatgaaataattaaagaatttgataatataattgaacagagtgatttgactacaagtattgaaataactagtaaaattcatacaattgaagaaaagagaacaatggtgggataaacgtaataaagttagataatcgtatgaaagttttagttgataaaattgatgatgaatggtttggtggatttaattcaattttcggtataaataacttcagatgttgattggttaataaagatattaagaaaatgatacctgaatttaataaatttcataaacgtatctttgaaatgtttttacactattagagatgttagtgaaagaaaaatattacagatattgaattttttaactggttttattgatgttcaaatatacaaatgaatatctaattgatgtttctaaagttatatttggaaaagttgcaaatattgttaatgaaaatggtcatattattcttatacctggtaatggatgtttgaaaattccttgggaaagtataccaacattacgtatgagatcagttagtagaatgccaagtatttcacaaatttgtcaatatttaaataaatttggtaatattgaattaaatgataataaaggatattatgttataaatcctggtggggatttacaaagaactgaatataatttaggtaaaagattgaaggatatgaatggttgggaaggtgttattggtaaaccacctaatgaatcagatattttaaaagcttttaataatgttaatatgtatttatatgcaggtcatggaggtggtgaacaatatttacaatcacgtaaagtgaaaagtagggaaagtataccagtaactatgttagctggatgttcatcaggtcgtatgaaacaattaggattttcatatgcttatggtacagcattcaattatattaatggtaaatgtccaatgctaattgcaaatatgtgggatgtaacagatcgtgatattgataaattaactgttgccgtattggataaaccaaataatttatgtcaaggtgtcggtatttcacgtaatgtttgtaaattaacatatttaaatggtgcttctgcagttgtttatggtatacctgtgtaattattttttactgaaacttttttatagaataacaaaatatcattatgataaataaagatcgtgaagaaattctgatttagaagacttggatatttgcttttgcattaaatcaataacatcaagcgttttaggatgccagagaactaattctttcttatctgtagctgatggcataaatgaaaacttttcaactgtaagtaaacctttttcattaactttagattttttaccatagttttcaaatactttacgacaacgtggataatggaatatatttgtacctggtatcaatttctcatcaacaccaacgggtgctattatgttatcaccatcatatactgagattttagtacgtattagtaaatcacgaggaacaactactcttgatgcgtggaccattctaggtggtgacaatataactgatgcagcaactgatttttcaagttctttcaagtagttaccagtcctctgtgagtgatgtataaatagtttcatgttggtttatttgatataacttagaaatgaaagaaaatatttaagtttggaaagaaacggttgtcattggagaagctcaacatgaatattgcagattttcaaaaaccgtcaaaacccttaaatctttgaatatacttttttcttccacttctttctttaaacaatatcgatacactctctatacacagttcaaagatgaagaatctatcgaatatgttcaaaaatacaatgtcgtcaatagcttcaaatgcaatgattttaacatctgcaactgcacatccaactaaccccgcaaaaatgtttggtacaacattatcatcagttgcatcagtaacagttcatcctgaacctattgttcaatttaatatacagataccatcagccacttcatcaagtatgcatgaactgaaatatatggcattacatgtattgaaaccaaatttggatagtgttgaactagctcgtagctttagtcgtggtgcaagacatgaatctccatttgagagaatactgtcaattaaatgggagatgttatcaaataaggattttgatatacccatactacatgatgtttctgatcatatactaatttgtgaaaaatataaagtcttcgaagtctataatcatgaaatatggacttgtaaaatcgttgatatattgacaactgaaaaaccttcaggtgggttattatactacaagaggaaattccacactgttggtaaagaatttatagaatcaaaatgaattactgatatatacatgtgcatattgtatacctatacatagaataaaatagaataaagtaaaatagtaaaattagttaaaaaagtagtttacaaagttaagctctgttcagtctcagttgtttctccacattcttgatatctttaatcaacaacttgaatttttcttctctttgaatactcttaatcttacgtctttcaacacgtaatgatatctccatctttttcaaactctcaatttcattgttgatcaattcaacatcatgatgaatacgtaattttttagagataatacgttcctttttcactaataattgatttttctctgatagtaaagtacttattttatcctcttcaatactaagtttgtttctacattcttcatcaaacttcttgaataatctggtttcattttcaaactttcttctcatttcatgatacttctcctcaacttcaatttgtaaaattctagtttcttctgattttcttgaaattgtggaaatatcactatcaaatttaacaattgcttgtcttaaactatccaattttttataatttcttgattcatcagacagattacttctattatttaaattatcaatttcattcttaatttgtgatgattttttcttccattcattcttcaactttttcaatcttgctttttcacgatcaattgcttcttgagtaggtaacaacagatctttgtaatgtggctaatggtgatgaagtacttgattcagtaacagttttattttcaaaaattgtagaaacagttgtagtagttaaatgaactaattcaccattaatggtaattttcacaaaatcaatatcgtattgacttaatggactcaatccattaattataattaactctttaccaaaaaatgaacatgatgcaacatgttcccaaataattccattaacttttatcaacagttgttcaagactaatattatgaagttcaaatgccaaagtagtttcacctgtaaaccaaataaaacattgtggtgaagaatcattattacgaatgtaatcgtcaactccataacttgttgtaacaatagcattttgagaataataatctcctgaataataatccagtcttgaaaacataattttagcagcattcaagaatgtccataatggctgttgatacttagaaatatataatttatttttcctttcgaaagatgaacttttcaatttatttggtaactttttattggcaacatgattcatatgaaatccattacttttttgtttaggagaaggatgatgcagatgatggtggaacacttggttgttgtgccaaattatttgcaaaactagttgtactttgaaactcggtgatattggaaggatgatttaaatttgcagcaacattattaacattagtattattattattattatttgatatattggaattacttgaattaccattttgattcaaaaatgaattattaaaagaaaattgcaaccataatcttttacaaaaattatcaaagtttgctgttacaacatatttgggagaagaaatatcacgcaggttgagcatttgataagttaaagaataccatgatgaaacaccggtaccagtatcggtaggaactaaaagaggagtatcgcttgagagatctgaatcaagttcaacattctcatcatcatcatttgtaccttcctctataaattgctggttattttcaacaatgtcttcgcctgcctaaatcatcgttcatttctagtgatgggaatttggagcttgaaatttcaactggaatttcgaaaacattttgagtctttggtttattaattgaattctgttgcattgcactaatttctaatggtattgatgaaaaatcattttcagagcttggatcagacttggatccagaactttcagaatcttcttttgattttgcctttgaagaagttaaagattcgaaaaatgaataagtactattaattattgacaattttcttaatattggatttaagttatgcatgatgatatacagtgacaaagttgaatgtaaaaattggaaagcatattcaagttgaaacatgagtactgaattttgttggatattatggaaacttaaatggtatagaatgaatttcgttgtacttggcgtaagtctatgttgtaaaggtaaaataaattcagatgatgaaaatatggaatttaaacttaaaagtgattcaccctctaacaatttcaaaatatttaacttgtattcaaaattgaatattcaagtaacacaaccaaaatagctgaaccaaatgcatcaaaaatatatcgagattttagagaggttaagttacttcccattaaagctttagataatagtaaaatatatggtataattgaaggaaaccagtaataaactaacagcattaatatagaatcggaaactatttgtgttatgataaataataatgagaatcttgtgaataaaactggataaattgggtaagatgaaaatagaaatgatgaattaggggcagttatattactaacactaataaatgaatgtttgttaagttttatattaagtagaaatgtgtagattgcctccaaaaactccgaataccccataaaaacatacaagacaactaaaatgaaacttatccaatgtggtaacattactaggatacaaacacatgaaaaagtatccagaaatgggtatggatggaagaaactgtgattgaatttgtgattgtgatggagaaggtgattgtgattgtgaaagaggttccttttgttgttgactttgagttggagttagtttcccatttgatgatgggatttgaccattttgctgatcatttttagtagtactaccatttgatgaattatttgcagtctgaccgtttgtacttgtcgacccattaactgcctgcacagtcatttgcccaaagaaactaagtctatattaattcacatgaaaatcctatcaaattcaagaaccgatttaatggcatataataaaattcaagtgaaatttgccttcactgtgtctcagagtgaaaaactagaaaatttgcttttttgcgttgttggggattcgaatagaggtaagtcctattttctttaacatgggaattttatttcttacacttttatataccaggttttactagctttcttttcttttattttgaggaaaatatcagttatactatcgattttagtatcacactaatagcattattatactactagaaatgtctttacaagctatcaagtttcaagtcctctccgaaagtatctctttccatccttaaccaacttcaagtgccatatcaatcaaaatatttaaatattgattcaattgctccatttaaagatgttaccacattttcaggttatgaagctattaagggaatgtacactcgtggtgcccctgcaattatgttagttggttgctttgcaattgttgttgaaatggataaagtactcaatgatgaattcattttcacatgctttaaattatgatataagcaattatgaaaatttcaagacacgtttattagagagaattgatgaattgattcaatcacgtcccactgccgttaatttagcaaatggttgtaatcaaatcaaaagtataattgctgattcttccattactactacttctgatttgtattctcgtatcttatcattctctgaaaacttatacaaggaagatttccaatcaaatattgatattggtaataatggtttacaatacatcatcgaaacattgaaagctgaaaattttaaaggtcctttttctgttatgaccatttgtaacactggttcattagcaacttcaggtcatggtaccgcattaggtataattcgtcatttaaatcaatatttatccaaagaaaccactgaatatccattctattttgaacatacatatccatgtgaaacaagaccttataatcaaggttctagattaactgcttatgaattacaatatgaaaaaattccattcactttaataacagataacatgccatcattcttaatcgataatttaaatagacctgaaaatcatcaaaatcaacatattttatcaactttatcatcgaatgctccattaagattcattattgttggcttctgatagaattgttaaaaatggtgatttagctaataaaattggtactttccaattatccttaatatctaaattgtatgatgaaattaaattcattggtgctgctccaattactacaattgattataatactgaatctggtattgatattaaaattgaagaacgtccaaaggatgaattaactatggttttaggtgctaaaattgaaaataataaatttgcaattgattctaaaactggtgatgttgcattagagagggttagaatggcacctttagatattgatgtttggaatccatcctttgatgttacacctcatgaaaatattgattgtattgtaactgaaaaatcttatattacaaaggatagcaatggtgaattccatttataagttctatagttcaacttaatttaatttaatttaatttaatttaattaattaatttaatttaatttaattgatataatatatttttgataaacaaatacataaaaacgcatatatatatatataatgaagataaaataataaagagagattaataaataaaaatgtaaaatgaaaagacaaaaaaacatcagtctaaaattgtttctttaaatgttttttctagtaaaaatatagattaacaatattggtatcgatattcataattccagttttcatcccctagaaacctgcattaccaaaacccatacctgtagaattaacacctaatggagcttggcccatagcaccatttgtaatcattaaaggttgacctaattttggagtttcctcttcagatttttctttttcttctctagcttttaaatccttataaactgcattaatcttttgttgattttcctttgcaattgaaatttgatatggtttagttaagtcatctaatccgtttaaccatgaaagctccattacaacatcataatcaatatatgaataacatgaatataaggtggcaaccatacattcacgattaccagtttcaacaaaatatgttaataaatcacttacaaccttggtattttgtgaaatttctgcagtttcaattgcatctgaccaaagaccatcagatttgagtaatgagattgccttgttgaatttcttattatttctgtaaataattgcagctaattgtctaaagaaaattaattcatgtttctctaatctttcagctagtccaatactatcaaatttatcatatgaatcaattgctaaacgtaatgacttgtaatcttcttcttcaattaaaatatcgtggtatgcagaattaacgattgaattgttcttttctaatactgaaattatgaatggtttaattaatggtaaattatcagatttttggaaaatcttaataactcttggtaaatctaatcttggagttaaaacgactaataaatcgattaataaagttggatgtaagttagtgtaaaaattgattgctctgtaataaatttctaaattagaaaccttgacaataatttccttaaatgaagaatgttcaaacgcactttcagatctttcaatcatagctaatgctgcattgtcccactcatcataatgacagtagaggaaaattaattcaggccataaatgagattcttcacatgctctgattacctttggaatattaattcttgaccagaataatttcaagtgttccattgtctttgaaggttcatatttggtatacaagattgctaattcagtaaacatacccatatgtgctctttctaatgataaaccattttcaaataatgaaattaattccttgaaataaccattatattcatattgtgtaactaatggttctaactcttcagcatgaacaattaagtgtaaaccacacatttgcgctaatttgaattccttatgttcaatacatgcttgattaacttgtttccaaacttgaatattagatgcttttctagcgcaatcaacagcagctgtgtaatcgtttaagaaaactaatgttgatgctaattttgaataattagaaatattttcaaataataatttagcagctttataattaccattatcatataatttatcaccaattgtttctagatctgcaacatttgacaattttaagaatttttcaatttcactcaatttatcaagagtagcatatgcattaataattgaaccatcaataactgattctcttaaagtctttcttgccatcattaagaatggaatgagttcttcttccttacctgcgtgttcactaacttcaataacatttgcataattagatgggtcttctgcttttaagtatgaattgattgcttcgttgattcttaaaccatttaactgagcttcacccaattgtgaccaaatttctggtttatctaatttttcagcatattcttcacccctatctaatgacataatatcttcaactaaaactttcatagcctttggatagttttcaaatttattataaatttcaaatgcttcttcatataatttgttttcaatacaaattggtgcaacttcatctggattgtatgcatcaatcttttcaatgtaattcataatacgtgatgaatcaacctttgcagcagttaaaattaataatgcttgtaatgaagggttttcattgaatggagaaggttctaagacaatcttttctaataaatcaatcaattcactttgtaattggttgtccatgaaagctttaacagcaattgaaattggttgtgggtcttctaattctggaataccagtaccaacaacttgatcaactaattgtttcttgtaaatattatctggagttaaaactttagcccataatgataaatctgatctctttaataaatatcttgcttggtacttaaacattgagttttcattagtaatgttgattaattcatcatcatttaaacctttatcataagcaatataagctaagaatggatctctcttttcacagtatttaccaacaactaaagtatcatattgatcattttcctttaagaatttttctgggttgttattagaatcaatgtaaattttcgctaaagtatcataaactgctttatcttgagtacctgaagctaaagttgcttctaagaaaggtaataaaatctttaatctatttctcttttcaacttcttcacacaattcagcaattggaacttgacctaaaacagattgtaataatgatttgataatattctcatcacaatcaacatctaataaagcagcaacaacttgagaggttttagaaggattaacttgctgaacataaacttcaatgaacttgaaaaatttattcttgtaaaggtaaagaattaaatcatgaacaaaattgtatctatcacaaacaacaataagtggtaattgatcttctaattgagcttcctttaagaaattcttaactttttcaccatcataaacattattatctctaacaactctttcaatttctttgacttggcctaatttagcagcacattgaatatatttcaaaacaacttcaggatcttgagtaacattaacaatagatgataaataatagtataaaccttcaactgatttgaaatcttcaaagattttgattaaagtaattgcaccaattaattcagaatatctggtggcaatttggattgcaacttgtaagttttgagcaatattacttgataaaatttctcttaaacaagcaacagattgatcaacttttaaattaccaaagtatgaaacaacccaatcggctggtaattcattagcatgtgtgataactcttttaatatcttttatattgtcataaagttccaaagctctttggtataaacctgccttttcacataattgtgcaattgttggtctatcataatgagtgaacatattattacctaaaatagcatcagcaacttgaggtgcatgtaataaattaacttctaataatttagtttgtagttgaccatctgcaggtttatcttccttcaatgcatccagtaagaaagcagttgcttgttgaatataattttgagaaaagaaaatatcagcaatttgttgaacgtttaattcaggttgagattgtaataaagaagttgcaaattccgctgctttatcagggttagatcttaagatattttgaattaaaacagtaaagtttggtttatagttaactttttcacagaatggtaaaattttatcaaattgacctaattcagctaaacataaaacaactttattagatacattagacttataataaacagctaatgctaaagttatatttagaggtttaattaaatcacctaattcttctgaacaatcaagtttatcttcctttaaatatttttccaaagtttcagttctattttgttgtaccaaaggtctaactaattctaatgtttcaaatttatttagtgaacctctatctaataaaaagaccaaatattgtaagaaaggtgcaggttgaccttgttgagaaggtaaactttttaatttagcaatagtatctgaatttcttaattgaggagaagaagcagcaattttaacagctgattgataatcaccagttgcaattgattgattaaattgatgggtgaaaaggttttcagcaccaggtaaaccacttcttgaagctagacttaatgctaattcaacgtcacctaagttatttaaaatgtaaggaataattctttcggttgaaatttcaacggctaaaactgaaccagatctattaattgtaattataccactatcattattgaaatttgcaccaacaaaaacaggatcagaagagattctatttaagaaaattttcttaccagtttcaacatcatataaatgaataaagcctaatttagttaaaatgtaagcaataccatattttgaagataattgaattgcaacagggaaatcgttactaacttcagcagggaaaaagatatcaactgattttttaacaaaatgaggagcaccatctttatgatcaatttcattaatatgtagaataccaccattttcagttcttgaagcaaaagcaaataattcagtttcaactgatgagccttgaagttttaaacttgtaaaattacaaacatgagcttcaatcggttgagagatatttctttcctttgagaaaagttgaacatgaccaacaattctgccattttcttgagcaataccgccaattgcaaaccaattaaggtatttatttgcagaaaactgagtaatttgacaatcatttaaactaacatgtcttgaagttaataaaacagggccagcttcagtaccatcaaagacattccaagtataaactgaattaattgtaactaaacctaaagtttgattatctaaccatttccagaaaactatcttctcattcataacatttgattttaatctttgctttgattctaaattaaagatttgaattgttgtatcattagctctaagagagataactaaatcatttggatgcataataacagaatcagcagacattgatttcttaataacattattgttattttttaaatcaactataattgcagaattacctgattcactagtttcacgacaacagacataatgatcggattctaaagttgtacttaagaaattaaaggattgagggttaatacccagggatgataattgacaaacatccactagttcgattggaggggcctcggacattgcggtgattggatggttctaaaaggaagagataacgatatatatacaacttaatacaaccaggttcccaaattgaagatgatgatgtagcgccaacaagtatctctgagagactctcttacgccaccgaagcaactggaaatttggggattttttgaaatttggaaattggaacagtcgcgtctttcaagttaagatctattttaagcttttgctatcatatatatatatatatattatatatataactattattacgatgattactatttttattattaatgttattttaaattagtattagtattattataataaaatctatacaattttaagtattatatatgaaacgaacgagaatcatcttttaaataaatattgtgtttgtaatagtaaatataatgtaattatgaggtatttggtaaaaactattaacgtgcaagaaatgagaatgcaaagaggtaagaaaaagaaaaattagtgatagaatacagatgaatattttttcattggtttagtattatcatgttaaatcaattaacagttaactaattcaacaacatctaattcaactggttcacatttactaccaatttcatttgcatataagttgtagaaattacctgaaagacattggtagaaagtagtagagttaccaattgctaatttaccttctggagagattgaccaaccagcagcatagattgcaccagcttgtggaggtggaccatcaaattggaattgttgatttgcaacaattgaaccaattctaccctttgaatcagttaagataccattgtgtaaagtcattgataaagtaccattagagttacatgcttcatatgcaataccatcagcagcagcttgtgcatcagcagatgattgtgcaggagattgtgaagcagtagttgaagcttgaacttgaccatcaccaatttgagtagcaccagttgcctttggtttttcagtagttgcttgaacttgaccatcaccaatttgagtagcaccagttgcctgtggtttttcagtagttgcttgaacttgaccatcaccaatttgagttgctgcagttgcctttgacttttcggtagtagtagttgcttgaactttgaccatcaccgatttgagtaactggttgtgcctttgtcttttctgtaggtagtttcagttgcggtagttgcttgaatttgaccatcaccaatttgagtaactggttgtgcctttgattttggagttgcagtaggttgcttgaatttgaccatcaccaatttgagagattaaagcaacagtagcagtagtagcttgaatttgaccatcaccaatttgagtgataacattgttaactaattgtttagtttcagttctagtagtagcttgaatttgaccatcgccaatttgtgtaacgacattagcaataattgttttagtagtttcagttgcggtagtagcttgaatttgaccgtcaccaatttgagtgactggttgtgcctttggttttgggacttggagttgcagttgaagcttgaatttgaccatcaccgatttgagtaattgctgctaaagtagtagttttagtcttgacgttattttcagtaccagtagttgcttgaatttgaccatcaccaatttgagttgcagcacctgcctttctctttaattcctttgcgttaagggaagcggataaagtagttgggattggattgactgcaataccgaatgaaccagtataatcagtctttgcacctgaaagggtaacagttggggttaaagtggaccatggttcagatggaacataagcagctgcagcagaacctgctaaagcgaagacacctaaatttctatattgcattttttgtttctagtttgtgtgttatttgagttagtaaaaacttttctggaaaaagaaacaagtgataaattttagaagaaaagaaaagaggagaggagtggagagaataggtaaaaaaggaaaaggtggaacagtgattctatttaaatagaaagtgaaacagtatcaaagcgggacaaaaagggaatggattattagtatggaggagtggaaaattgaaaaagttcaatttaactcctttagaaattaaaaataaatcattacatttcctttttgggaaattaaattgatctgttgtttctatttttagtatctaaattatatggcgttatattaatagttactttatttagtatattgttatattggtatatttacactgttatttgatatgtcatatactacattactatactatatatattcgactgctatatatattactatcaaccttatagtattatacatcattacactgttgtcaaaatcactcaccccgatgtaaccccttgccaatagacgataattgcataaattgatggaatttaccccaaaaagggaaatttcattacgcgcgtgttatgacataaattaaatttattagcaaagaatgaaatattaataattaaaaaactttcatgctaaaaaatagactctgttcctggtggcaaaatactgacacactactggttgaaaataattttaagggactatactatttaattatgacataatcatttcactgacaatattataaactactgcgccacggctcgctggtaatgatttactttcactatcttcaccagccacatttgatactactttatcaaatacttcatttacagtgcaacattccaatacacccaacttctcaaatgcatctccaatctctttctgatgattatccgcctaattgttcattaactacaactattaatcgaatattattatcacttttacttcgtaaaacatccataattgtacctgtaccggcatgtgatataacaattgaacattttttactatattgttcagttaataaattatcatactgaacacattttatcaaaatctcatttatcttaaattcaaatactatcccatatttatcatcatcatactcttttactttaaccttttttactttctgtaaatcatccaatatctgatgcatcatatgaactgatgtttccggtttaccatattgaactaatatccggtcaatatttatatatttttgtgaaatcatctcaataaatttaaaatcaattatcttctcaattaataatgggaaactaactgttgcacctgtagttaccaactatctgctctttccaattccctgtcattatttctatgtcaagtatgtatttaaaatatcgatactgatctaataaatcactcagaacaataaaacaatgtgaatttcatcaaaagatcggatataacgaatttaatttttttagtctctcaaaattatacactttccgattaacccaattttatttcaaaaattactaatctacctgtataacatctttcttttatctaagttgatatcactatcgaataacctcaaacaaaatgacagacgattcacatatcatttctcgaataatcgctcatatgaataaagatcatgttcataatttagaagattatttagtagtttattcacatgttgattcagaaattgcaaaacgtaatccaactttagaaactttatcattaagttcaatgacaattagttatattgatatgcatggtacaaaatgtttcatacgtataccttttgaaccaactttacaatcttatcgtgattctcgtaataaattagttgaaatggctcaaaaagcagctgcaaagagaggttttagtgaatatttaattaatgatataccttttaaattcaaagattggattacagttttcttatttatttcactttacatatttgcctatgatccttcaattttacaatacttaattggcgatcaattattaaatttatcatcagatgttcaatcttatataatggattatcatattacagttttcagaacaatattaattatacattgtcttgaagcaattgttatattatatcctttattaagaaaatttagaatgagtactttaaagaaaatgacttgtttattattatgtatgatggaaggtatggtatttttaagttcttttaaagtagctgttgatgaagctcaaaatcctaaaaagccaaagaattaattgttagttatataagctaaatatcatatttaaaaaatcattcactcattgcattgaataatatgatacattgactttttcatcattaataacttcagttcttgaaacccaactaaataacgctttatgtttaataatttcctttctctttaatttattttgtttccttctctcttcttcaaattcttgtttctttgcatcaactttctcaattttacgatgtaataatttctttaatgtttccttcttttcagcttctaatttacgtaaattaaaagttttacgtttacgagctgcctcggatttcctcatttcaatttcttcctgtgttaattgtttctttttttgattaccttccattaatgctaaaacactctttggtagctttttatcttgataaaattcaggttttaaatcatcaggatcttcgaatgtacctaaatatttagccctttgtctatcacttagtttacttaaatcaatttcattttcatcatcagatttataaattaaattatcatcatctgaatcatcttcaacatcatctaatcctataacatcatctgaatcatcttcgagttcaatatcttcatcctcctcatcttcttcttcatcttcttcatcttcttccttatcttgacttctctcacgttgtttagttttacttggttttaattttttaatatcttcacttgatgctgatttattatcctttctagttagattcttaagttttaagttaatctttttaccgtgtttctccttctctaccttcaccttgtcaactttcttcttatctttactattcttgggaagtttaatattaataaccaaactattacgtgttttactcttcaccttaacatttttattattcttcactgtacttgtacttttacttttatttgttcttttacttgcgcttttagtttcgggtattggtgtatcatcaacttcatcatatgtatttatagcactaagtaattcatcatcttcctcttcttcctcttcattatcatcttcttcattattgacaacatcttcatcaatttcatcttcctctaaatcaatgatatcttcctcatctattattttaatctcttgtttcctgctcctgcttgtcatcttagttattggtatttaaagtaattgcaagataatatacatcacactttaatggtatactttctaatcctacttcaacatgattaatctgtctatttctgaagcgctacgattatggttggtttctggtgtacaggtgttaattcatttcaactgttaataccccccaattattactttaaatacacaaatcaagtactgcactacatattatcatcatagctatagtactatacccatggaaacaacaaaaaactctaaaggaaccaaacaaatcaatgaaaagtagcccaaataaggacaattttaagtgcatgaaaattttaaattattaacattttgaaaataatatatgaaatttacacaattattgcttactttttctggagaagtaaaccaagttgatatcatttagatatacaacgacgtggatttttataaaaacataatggagaataataaatcattatgtgatgataatgttacatttaatcttgaaaatataaataatatcgaaaatttaaatgattatcatttaaatcaattaaataatcaattaagatatgaattaagaaatttaagtaatgaagttggtatggatgttcaattatccgatgatgacgttggtgttgatgtgggtgttgatgttgatgttgatattgataaaattgatcatttagatcataatgcaattgaaaatgcattaaataatgcatttaatgaaagtgatagtgaaccatttaaaaattatattaaatcaattgttaatagaggtcaaaatagtaatagtaatcatatacctcatttacaattaaataatcaaacaggattaaatttaaatgttgaaaatggcaatttaaatattgatgatgatgttataaatgatattacaaatttaaataatactactaagaataataatagtaataatggtattactatattaaaagaaaataatgataatcaaaaggtaagaggaaataccaataataatgagagtaataaaagtagtgtccgaaataacgataataacataataaagaatagtatcaataatactgggaatatcaataataataagaacaaacttcataaaggtaatgaagatggtataccattaaaaacgaaacgaataaaaattgataagatgtgtctgaatttaaacaatataccatatgataataataagaataaaaagatagataaaaataatgataatgataatggaaataccaataataagaatagtactgctaatattattaataatataataaatagaactaaggacacaataaattttgaaaaatcacataaattgattaacaatactattttagatttatcaagaaaatgtaaaaagccagagaataacgttactggtaatgataatgaaatttctgctattaataatgataatgataacaaaaataaaagtaacaataataaaattatagataaaaataacggggagaatagtataaacgccaagtataactaataaccttgaaataagttcaatttctaatataaggaaatgttcaagatgtagaatgaagagacttctggagaatgaacatcaattagagaaatatcaaacatgtgtacaatgtcgagaaaggaggaaagttagggaacgtaaaccaagagttttatttaaattacctaatttatcagatgattggcatatatttttatcgaaagttgcacttaataatgtaattgatttatatcaacataattatagagcatatagtgaagagagtgaatttccaagatatttaccaaatgaattaacacatgagatagttcaaaatattggagagaaaatagttgaaaggtatgttcatccattacaggaagttacaggatttaaatttgcagttagggatcatcataatccatcgtttattgaatgtaatagagctaagaaaattacatggatgtttatttgttcacaagataaatttagaagacgtaaaagtaggagtgagaataagaggaatgttttaaataggttaaaaacagaggaatgttgttctaaaatatcattaagttatgatattgttcatggtataattcaaatgagttataatcataaacatcataaaccatttgaggaacaaaataatttattaaattctagtcatatgatgatgaagaatggtaaaaatcaattaagtattgaagatgttgaaaataataaatcaggagtttcaagagctgatattgaagcagcagctgcagcggttgtagctgttacaacaagtggagatattgaagatatttatgaagataataatgaagatgataataataataaagataataataataaagatggtaaagaaaaagttattagtgatagagttattactaaagatattattactgttacagatgataaagaaggtaagaataatgccaaaactggagagattgaatttgaagagggacaatttgagaatattgaagatatcaacattattggagatgttgaaggtgaaattgatggggatattgatgttgactgtagaggatgtagcagagatagctaagatactacgacaagtacaacaggcacagacgagacgactcgttgaaacacaaacccagtaagtacttagcagtagttatatcggataaacctcctcctaagaatgacccacccgcttgaaaatacaagtttcctattgttgcaatttctcgaatttttccaaatttttttcaattttcaatgtgtcactctggtgataacggattataggttaagtaatgttagtattctattgacaacttatatgtccaattttctgatttatttagattttattctattttattctatttttttatagtgtagctgtataacttttattccgtcaaccatttttgctcttttgttatcatcatagtgacatctttttaaataatgatgactaatcgtttgaacttatcatttaagttcactagtaaacttaataatagggggttatttttaaataacagaatcaatcctatttctgttttcaataattcaaagaaaaatttagttccttctggtagtagattcttttcaaatacttctagaaaattcaatattaattccactaatgctactaatgctactaatgctaacaaaaatgttactgttaaatcaaatattttcacttggtcattccgtgcagttttctggtcaggtattgctggttggtgttatcttacttatttagtttataaagaatcaaatcctggtaaacaattacctcaaactgatttaaaggataatggtaataaaaaaaaacatgtcgttattttaggttcaggttggggtgcaatttctttccttaataaattagatacaactcaatataatgttacaattgttagtccaagaaattatttcttatttactcctcttttaccttcagttccaagtggtactattaatataaaatcaatttgtgattctgttagaacaattgcaagacaaacccctggtgaagttacttacctggaagcaattgcaaaagatgttgatcctgaaaataaaactgttaaaattgaacataaatctcaaagattttttgttggtgatgcctttacaagtgaaagagatcctttagagacaacactctaattatgattatttagtttatgcagttggtgcaactgttaatacttttggtatacctggtattaatgaatatgcttcattcttaaaagaagcaaatgatgcaactgctgttagacaaaaattattcgatcaaattgaagcttcaagattattaccaaaagattcagatgatagaaaaagattattaaatttcgttgtttgtggtggtggtccaacaggtgttgaattagcagctgaaattaaagattatattatacaagatttatctaaatttatacctggtattgaaaaagaaatgaaagttacattaattgaagctcaacataatgttttatcaatgtttcatccaaaattaattgcatatactaaagatgttttcaaagagcaaggtgttgatttacaagttgatacaatggttaaaaaagttgatgatcaaaatgtttatgcaacttataaacatccaaatggtcaaactgaagatattacaattccttatggtacattagtttgggcaggtggtaatgcacaacgtgaacttacaaaacaattggcttctaaaattattgaacaaaaaactgctagaagaggtttattagttgatgattattgtaaattagatggtgatgataatatttttgcattaggtgattgtacatttacagctaatccaccaactgctcaagttgctcatcaacaaggtgttttccttgctgatcattttaataaattatcaaagaaaaatgatattcaatatttaattaataattcaaatgatgaaaatgaaattaataaattaaataaacgtttagctcgtattgaaaaaactgataaaccatttgaatatattcatcaaggtgcattagcttatattggttcagaacgtgcagttgcagatttatcatggggagattggtcaactgttgcattaggtggtacaatgactttcttcttctggcgttcagcttatgttacaatgttattaggtattcgtaataaaatctttgtcgtttcagattggttaaaagttgcaatctttggtagagattgttcacaagaataatcattataaagtattcatattaaattaaattatttaaaaacatatctttttacacacaatatattatttgtctttttttttcaatttccttatttaattaaatttatagttttgaattaatatattccaatacaatatacatcataatgaaaattgttacaaaagtaagacatattatacacacttagaaaggttttgcgcattttcttttgaaaacttccccagtacttggtgcaaccattgtttcccaatctaatgggtataataattcaccattatcattacgtgcaaatacaacacctaaatcatttctagcagttgataaataaaatgttacaccatcacctaatgataaaacaactgcacgtataatatcaccaggttgataacattcccaagttttaacattttcacgttcagttgagcgaacatcttgtgatcttatagttgctttgaaaaattcaccagtttcacttggtaataaatttaataattgtaaattatcaatatttccattatcttgagaattttctggtaaaacacttaaaatttcaacattaattcttacatgacttaattttgtaattctagctaacacaatatcattgactttcggcgtaactgctttaaaattcttacagctagcgtcatattgttgattatcattacctgtattatatctaaaatctttctttgatataactgatactattttagtattcttatcatcaattttcttttcatctgtaccttctgtattggatatactattgctattaatattatctgtgatttcaacacgtccaagtgctgttgatacaagagttgggattttttgattattaaattgaattgtctctaaacgtacattttctccagctatatattttatactcttagaagtatctgttggttgatatattggtaggattggttgtcctggtaagactctagcagggtatgatacttcagtcattgtcacctatttcaattgctatataaacttgaatttatcaattgaataatcaatatcgaaacactgaaatattgaaataatcatgttaagagagatctttcatcccatatattacgtaacaaggtatatcaaagtgaaaaatttctttttactaagcgcagcggctactataaaaaaaaatttttttctccctcaaaaataaaataaaaaaatttttcagattacaatacaagactgaaaaattttttatctgttggatttttacttataaaccaccctgtttctttgtagttttagtttaaaaatatttcagttcgtcttgttggaattaattattattaacttcttttgaacttttattcatttcttagaattcaatctcatcaaactaatatataataacaatggctaaggcagatattaagaaatcaaagaaatccgtttcaaagaaacaagaagaaaaagcaactaaggcttccaagcaaaagaaagaagaatcttcctcttctgaatcatcatcatcatcatcatctgaagaatcatcatccgattccgactcatcctctgatgaagaagaagaaaagaaagaagaatcctcatctgattcatcttcatctgattcatcatctgacgaagaagaagaagaaaaaaaggaagaaaagaaagaagaatcttcatctgattcatctgattccgattcatctgatgatgaagaagaagaaaagaaggaagaaaagaaagatgaatcatcatcatcatcatcatcctcatctgactcatccgattcctctgatgatgaagaagaaactaaggaagaagaatcttcaaaaaagagaaaagctgaagaatctgaagaatcatcctcatctgcatcccctgaaccagaaaccaaaaaagcaaagactgaagaagcttcatcatctgaaccagcaactcttttcattggtcgtctttcatggaatattgatgatgattggttaaagcgtgaattcgaaaaatatccaggtgttatttccgcaagagttatctctgatagacaaactggtagatcaaagggttacggttatgttgattttgaatcaaaggaagtcgctgataaagctttagaagaaatgcaaggtgctgaaattgatggtagaccaattaatgttgatatctcaactgcaaaaccaaaaactcaagatagatcaaatgatagagcaaagaaattcggtgattctaaatctgaaccatctgatactttattcattggtaatttatcattcgattctgatagagatagtgttactgaattctttgctgaatacggtccaattatgggtgttagattaccaactcatcctgaaactgaacaattaaagggtttcggttatgttcaatttgaatctgttgaagctgcacaaaatgctttagataagttaaatggtgaatacttaaacaacagagctgttagattagatttctcaactccaaaacctcaaaacaataatagtggtagaggtaactttggtggtagaggtggtagaggtggcttcggtggtagaggtggccgtgatagaaatgataacagaggtggtttcagaccaagtggttctggtgctaactcaacccctgttaattctttcagaggtaccaaaagaactttcgattaaatttgattaattcaatttaatttaattttctcttttgctataatttcaagagtttatcttttcttttcattatcataattattactattattattattatcttcgtgcttgtattgatagtattcttttttattttattacacgttgatcattttcctaattcgcaatatttaaaacttgatctatatctatatttaaacttatgtacaatcatcaaattaaaatttataaatacatgcttttataaaaactataaaatttattcaaaaggtctactaaattactatctttttgttataaacaacggttatttctttctcatattgatcttatttgtaagtttaacatttattttgaatctaacatgcttattttaataaaacattctactagttaatctttaaaaccttaaaatgatgtatcacatttttgttaataaaagtaaaatataagcattttgaggtattgctaactttgttggtaaattccaaaaatctttgctttccattaatttttttttctaacctttttgcttaaataacattaataacaaccaaatattaactataaattactcaaaaacactttaaagccataataattgtaaaaaataaggttctaaagtgtggaaaccaccattttattggtttaaaagctcctaacacaacaaataacatgtcgtgcaccaacatgaaaatttatcgcgtagatcgttcatgtgtacgtacagtactgagattgtgcatgaattctacgttagaactacatttactaattctttcgaaaataaagaaagttcaaataaactaactatgttaagaaaacaaggatctggtcatatgggccagaaatcacctcataaaaaagatcgaatatctacgttggaattttcagttgcaaagttgagatcgccaataaagagatcaatgtttgaactaaataaaattgcatatgaaaatgcaaaacaaaatagaaaattgaatcttgaaaatgaaattgatgatgacgaagaactggctcaaaatgaaaatagaattttgaatgaaattatacgattgagtaaagttgatggtactaatccactacatttagaagatgaagaagaagcccaagaagatcttaagatacaaagaagaaaaagaattgaacagagaatagcagaaacagatttgggcactgatgatgaatacatacccgaacctaaaatagaagccgataatgtgagagaagtacttataggttcagatgaaaattcggagaaagaaatatcgagtccatcacgcaaaagaaaattatcaattactttccgaaaagatgatgaagttttgaaagacgatcataatgaatttatagaatttgttgaagaaaacacagaggatcctccattgaagaaaccaaccatcagtaacacagcaattcgtataaacttaaaaacggatacaacaccttctttgaaatttgaatctaatgaaataaaaccctcaatttcaccagttaacactcccttatcaactcccatcaagaaagaatcaaataactctgcattttcatcccctcttagaagaacacctagaacgagaatctcgacacaacttcaagccgcttccatagaatcttctccaagatccccaagatcaccaagaagaagtaccagaaatcttgctagcagttttaatgattttgaaaaacttaaacctaaaaacttccaaagtattaagttaatggaagtaccagatattgatacaaatgatgatgaattattagaaacagacaagaatgccaaaaatagaactctttatcatgacggatatgaagcatattttgaacagagtcaaactagaccgcacatctctaaaaactcaatgtcttcgtttccagagttgacatatgaagaattcaatgaatacaacaaggaacttgatttgaaaatgtccaagttacaaacaaatctttccagactttacgaaatgcaatttgctcaatggagttttgaattgaaagaggatttcaacctgatgttctatggatttggatcaaagagaaatctgttaatcaaatttttaagagattatttattaccggaggaaaaaaacgcaaagtgtttagttatcaatggttataatcccgagttttctatcagatctttgtttagagagttatggaaaatatgctttaataaagtttcaccgattagaaatgagttaagagaaatatgtaacttaacgcaccttgaattcatgaaacataaatataagtcgacaaaattatttatactgattaacaatattgacggtgaatcattcaagaatgaagatttacaatacattctcagtcaaatcagtaagattcaacaaatatcccttttatgcactgctgataatcttaatacccccgttctttgggatgcatcaacgctctctaatttcaactttatctggcaccatatatctaattatcaaagttacgctactgagttgactttcaaagatcctttgagtttaggtaaaactgatgaaatcgcaggctcacgtggtgctaaatatgtcttaaattcgttaactgaaaatgctaaaagtttatataaacatttgattctatcacaaattgaaaaaattgataattttattggagatgatgttaagttggttgaaaatagaggtaatataaaaggttcaatgaaatgttcaatccaactgcgtgatttttatgagctatgtatctctgaatttattatctcaaatgatatatctttcagaactatcttgggtgaattttcagaacataaaatgtgtaccttaagtcgtgattctactggtgttgaaatgatttacattgggtttagtatcgatgaactagagaaattgttggatcaagaattaatggattaaactttataaacttttctatctatagactatataaattacacttaagaatgtttcttgaattggaatttggatctacataatggacatgttgatgcacctgaacttttgaaccatctatacaaacaagcagaatggaaattatgtttacatgtaggacatactttatttggtgtagagtggtcaactgcattcaagatagaataacaaattgcacaatcttcatagttttcaaaattagcagtaacgttatccttgaaatgtttaatagaatctaaaattgaaccattttgaaaattgataacatattgtgctgacatgatccatgatttccacttcttttcatcaacacctaccctactaacaccattaacagaaatttgagataatggataatttgaaggtaaaacgattgagatttccattttttgttcatcaatattgtagagacatttgatttcattcattttcttgtttatattgatcttaaattccgagtcttcaatagaagttttacctgacaatgtagataatatgtcattgattaattgaggactaataaaattaataataaacttttcagtgttttgttgtaattgtttatctttaattgatctgaaccagttctgtgtcaaagtaccaccaatattgtccataagttcataaactaagttcaccaaaagctttttaacttcttcctcgtaagttaaaactttattatcttcaacagaataattcttaacgtagttttcatcatcatcatgtaatttgaatttacttacatccaactcactgaacaagaaatctaaaaatttgcatatagtttcttcattcaaattactgatataatcttgtctcatttgttgagaaatattcttgaaatgatccatgactaaataccaacaccataaatatttgtaaacatctgattcttcttcatattcaatataatcattcaatggcttgttaacatgatcaagtaatacctttggtaattcaatgttagagacaccgtcttcattaacttttttctttgacaaagcaaactcaacaactaaattatcttgaacttcaggaatcattttgtctaataatgaaacagttaatctttgaaaatctgtgttatcagaatctattaagttatataatttttcatagaatgggttgaaagacttcatatcaaaatgatttgagaatagtttggaaatttgttcacaacaaatctttaaaggttgattttttcctttaatatcagcaattttaaaaaatatttcaatgatctcgccattaacatcagcaacttctgaatcccaaatttcgatatcccctttgtattttaataataagatgtactgttttaaggaaaaatatgtaagatcaagtgcaattttaacttcagaatttatcaaagtgaaacttccagtaaataatgaaacacccagtttgaaaaccttctcaatatactctggtaaataattactatcgcaaacatagtagatactagtaatataacgttggacaaattgcattagtgcaattctgacagggttaaaaacatcttcaaaggcaacatcacaatctaaccaatcagagattgcatttaacaacatcatacatctcgcaggtgcaattaatgttaatttttctaagccttcattatcagtatccaaattgataaaattgtttaacgtaactaagtaaggtaagccctttttgatgattgagtcagaatctcttaatccaatcaagtttgcaacaacatcagttctagtaaaatcaagattctttgcaggtaaaaattcagtacttgattccaatatgacattcaataaagtaagcttggatctaaacggtttgaaatcaatactttcaaaatctttcattgagattgaaacaactttgtcatccagaagaatctttaataatctatgtgcataatatgaaaaaagtttgttctcattattaataagatttaaaaaattttgaagatctaaagcctctgaacttttcaagatattaacaatgtcaacaaatgtatactgttcaaaaattttcaaaaacttagattttatggagctttggaaatcaataattttgttttcaaaaacaccagtaaatgaattttgcaagaaaaaaatatctgaagataattcagcaactagagctaatgttaaaatatcattttcatcagtagtatcattttcgaatttggcaacgacttctgttaaaaatacagattggtaaatagctctttttgcttcaacaatatttagcggctccgttgaaatgaaatcgtcaatgaagagataaacagataaacctaaagagttacccatagatagtaaactttgtggagttgatgtgaatatgctcttatattcttcgaaaagatcttttttcaaaagtgatttaataagaattggtgataggtgtgaaattagtggtacaaatgagccctcatatttgcatacatgtaaataataatgattccacaaacatttcaattaattcagcgtcagtatcaaagttttgttggagatttttcaataatatcagtgaagagtcatattcagcgtcattttgttgatgataaagtaaagatagacataatctgttgataaattctatattctgtttggtgaattcaacaaaagtggtgttattgtaatatttggagcaattagaaacaaatgaagcataggtatcacttttaaataagtttgataaaatttcaggagttgagaattcgtataatgaactactattttgggtttcactacttggagataatgatctggaattttcaactaaataactatttaaatctcttgatttatggatatcaaatttctgtaatttggaaattattcttaataagttttcaacatgcttaagttcctgtaatttgatataaaatttattgactagattatttaccacttctggatcagtcgacaatgatgaatgtgaatataaaatgagagtttccaatggaacatctataaaagtttcagaaagatattcaggtaatgagttagtaaaatcattaatactttcatgatattgttcatctccttgttttatgaataagttgatgatattaaaacttagttctgggtttgaagaaaatctatcatattcagataatgaatcaacaggaatttgctaataagacctctgctaaatcagatccatttgcaattaaaacttgaacaaatgattcaataaacttagtttgatatttgggctcaaaatttttgaattctgtaaaaactatctttttatcaggtaatgcatccattattgcagaattaatatctaataacacatctttatcatcatttgaaaactcatgcacatcttttaataatgaaattatagctttagataaaacacgaggggaatccattaaagtaatcaaattcaaagtatatttttccaatattttatcagttatatctccgttttgtaaaatttgctttatgattttattattgattatccaacctttttcaataaaagtaattgacttttcgttcttgataccatccatcagcgctaaagaataaggttccattttctgtgtgtctttaaaagatacaacttcatcaggaagtaagttgataagtttataaataatatcataatattgaggttcactattaagagatcccagtttgagtaatgatagtaatttttcatcagattttttgatatttatccaaaagcttgtatcatattcagtaacacaacacaaagtctctaatatagtaattataattgaagagtataataatgggtttgttttggaatcaaatttaagacctttaaccattgattttgaaagtgctttgtataattgtttattcataacaccggatgatttcaataaagtcttatatgatgtataagctgcttttttcaaattgaagttagtggaggtaaaacaatcatgtaaggaatcattagaatatatatcgtttatcatttgtacaagttcatcatttggagttgttgcattattttcatttaaggcatgaacgagaactaaaattgaaccttgtaacaatcttataaatttagcttcagtttcatcctttgttgaaaatctttcatctgatatagtatcctctgtttcgcaacaaataacttgatgagaatatttgattatctgtgggaagaatattttccaaagatttgaaattttaaccttatctccattaaatgttgagtgaattgattcattacatatttttgatacagttctatctgaatcatagatacctgctaaccaaattgcaattgtatcccttaagtattttgcatattttttccctaattttaaaacgaataatgattgaatttgatgagctgtaactctaatttttcttgaatcatcaactgaaagttttggatataattgaacccaggtgatgattgttaaatcatcattcaattcctctggattttctgttagatagttaaacattgcagtaattgatttttcctttgtactgacatcccttttcagtaatgatttgaatgttaactttaaagtatttgaacatgtcaaatgatttggatctggtataccggtaatgtaattcaatgaaacttcaaatccattatttcccaaaccagtatgatatgaatctccaaaagcagacatggttacaaatctagtttaaatgtgtattgattgttataagtagggattaatcaaaggtatcgaatgaattttcattgaaattccacttagtaatgctgaactttggatggttttatttactatattaggtaatcatcaatattttcaatattctgatagtagttcgacccgtctgatggtggctcaaaaatgggggcttttatcgtttattataggtataagagggacaaaagaaagtagagataagtataattggcggtgatatagagactagaaatatgattagtactataccatcttgtattatacaccattatagaagaaacaccaagaaaagagagaaagaaagaaagagtgtaatgaaaagataataagaaagccagaaaggggaaaaggtaaataaaaatactggaaatgtcaaagttgatcttttgacattaaaatatatcaagaagaagaaacgtatcttttcagatatcgtattatattctttacctctttctttcttagttgctatcactcccgtgacaatagttgctttactgctgtatctctactgtcgtttctttaatttgttagttttgtagtcactaatatttttttgctaaataatgaataaggaagatattgctccaattgaatttttaaagggtaaagtttaccttgttgtaagtgacgtaaaacctgaagacactgatgattttgtttattttacaattgaagattcattaccatataataattttaatttagattttggtccattacatgttggtcatttatatagatttgcagttgcattacataaaattttaaatgattccaaaaataaaaataaaagtgttggattttattcatcaagtagtcccaaagaaagaacaaatgctgcatgtatattatgttgttatatggtattagttcaaaattgggctccacatcaagtgttattaccaatttctcaatttgaacctccatttatgggatttagagatgcaggatattcacatcctgattttgaaattacaattcaagatatagtttatggagtttggagagcaaaggaaagaaatttattagatatgagatcatttaatttagaagaatatgaacaatatgagagagttgatcaaggtgatttgaatatcttagcaaatgattttataccatttgcatcaccaaagcaatcaagacctggtgcaacattaaatcaaccattcaaacaagttttagaatttttcactaaaaataatgttaaattagttgttagattaaattctcatttatatgataagagagaatttactaaaagaaatatgcaacatattgatatgatatttgaagatggttcatgtccaacaattgattttgttcaaaaatttattggggccgctgaaagtatcatatcaaaaggtggtaaagttgcagttcattgtaaagccggattaggtagaactggatgtttaattggtgcatatctaatttatacacatggatttacagcaaatgaatgtattgcatatatgaggatgattagaccaggtatggttgtcggtcctcaacaacattggttatatttacatcaaaatgaatttagagattggagacatacaatggtattggatacaattcctgatgattttattggaggtttatatccattgatttcatatgaagaatataagaaaagagaacaacaagagaatgaggaagaagatggaattaatataactgatgattcaagtgatgatcaaatgaattttaagaatgatcaattaattagaacaccagttagaagacgtaaaatttcaactggattgaaaaatatgaatagtaaagcagttccagagacaagtcctggacaaccaagaaaatatcgttcattagataatcccgttcaaggatatgttaattctgatgaagaggatgcatatacttccacaataaatcatacccataatcaaagtgtaattgatgatagagaaataagaaatgatagaccaacatcatcaagtatggtaaacacatctaatataatccttaatgatggtacatcatcatcaacatcttcaccatactataaaaagactacaactacaaccacaactactacaatatcatcaaataattcaccaaatagtagtttgaatggtaaagtaagggaagatccaaatttccttaaaattggtaaacaaaggaaaactattacacatgtttcaaaacctaaaagtcgtgtatctagttcagaaaagataattggaggttctggagtgaggaagaccttcatctaacaagaaatcctttatccaaatgtagtgatatctacaaaggaaacaagtttgtgtaattttataatattaaaatagagtgaagcttctagaaacttctcggtgtcagtcggtaacaccgcgtaaaatgtataaagaccgacatgttttctatatagggagggaatcttgctgtattacctgaatctttacatgtagaatgattgaaagataaggatgtttgcctctaccatatcgaataaaccggttgcaattgcacaaccggtatcaccacagaaacaaatgattgaatttcaacatgtaccaattaaacaagtttatcatttatcaatttttatgttaccaaacgttcaatttgatcctgattttactgcattaatttattatcaagtaatacctgaaaatgcaaattcaccaaatggtaataattttggacaaataacacaaggagattttaaattgttaggatatttaaatgcaaataaacaaagttcaatttttaaaattaatccaggtaatattgatataccagctggatctggaactcatgatgaaggtgatattgatatggatagtggaatttcagagaatgaagaagttaatatagtaattggaataagtattgaacctaatgagagtgcaatgcaacaattagattgtttaaaagttacaagagatagtaatagtaatgcattggttaaagcaaataatagcaataataatatacccgttattaatcaatcattagttttgaatgttagtaataaaattataggaaatgcatataactatctatcatcatttaccgataataacaataatgttagtattaataagtttaatgactggtgggataaatttaaaatgaaaatgacaaatgatccaaattatttacagaatcttgaataatatattttggttagttattataataattatatacagatctatttacagttttaaaaaagtttggaaattttgaagtcttgattgaacttcttctggacctaataactccaaaattatcggtaaattaatacctgattgtggtccacttaatgcatatcttagtacttgaaatattatacgttttttcaaatcaggtgattctaaaaggataatattaattgtttcgttgaattgctcatgtgataaggattttgaattttgtactaatttgtcaacaatatttgtaagtgtttgattatcaattttcaatttacttaaaatttcatccttgttataagttggacttatgaaaaaataatgatacatttcagtattgaaatcatttaatttaactaaacttggatagatcatttttaaaacatttgaaactttatccttttgtaaattatttaaatttaaagtatttttaatattttgataagattcttcaactgcattttggaaaaaagttgaattaaaagtttttaatttttcagttaaataatgtttattgaaataatctaattttttccaatcaactttagcattaccctttgtaagaccattaattgaccaattttgacataattcatccaatgaataaatttcactaactttttcacctaaatctctcttaggattccaaccgaaaagaacactaaaattaattaaagcctcaggtaaataacctttatttttaagtgacattatatcaatatcaccagatcttttacttaatttcttaccagccacagttgtaagtaaaggtatatgaataaattttggaatttcccaaccaaaagcattatataaagcaatatgttttggagttgaagcaacccattcttcacctctaataacatgagttatttccattaaatgatcatcaataacattagcaaaatgataagttggtaaaccatcacttttcatcaaaacaggatcttcaaatcttttatcaattgaattaatttgaggttgtaaattaatttcaccatgtaataaatctataaatgttggatattgatttggtgatttaaatcttatagtaaaagattcaccattttccattcttttattactttcctcaatagtgatattattaatacaatgtctatcataagaaacagttgttggaggttttaataatctagctgaatctctcaaaccatccaatctatgttttgaacaaaagcaacgataagctaaacctttctctaataaatgatttgcataatgactataaattgaagaacgttcactttgtctataaggggaatgaggaccattattaattggactttcatccattttaatattaagccatttaagagtttgataaatattttcttcagcaccatcaattaaacgattttgatcagtatcctctaaacgtaaaataaaagtaccattagttgattttgcaagtaaataattatataaggcagttctaagagaaccaagatgtaaaaatccagttggagatggagcaaatcttgcccttaccggtattgaaggttgaataagtaatgaagaatgtttatgagatgaatgtatatgatcattagagatttgatcattaggagtagtattagaagatgatttagtcttagaattcaaggaatttctaagattaaaggctagagtgttagtggtgacatggaaatgtcttctagttgaaggtattatacctttcattgctaaaaaagagcaatctataatgctttccattcattcagactgattccataatccattgatattcatgtaaagaccccaaaacggtaaagacaaaaaaagacgcgacgatggcagccaaatttccgacaaatttaataaaattattttaaaattattttctgggagggcaacttagtaatttttaaagattcctcactatgcttatttgaactttccaatttgaagagaagggagtcgtttgtattaatacatgagcctcaacttttgattacaaggttttcttttaatatcttatttgtttcctcatagtttggtattagtattaacaggactgagatatacccatattcacaatcattgactcatcatatcttcccactaatttacaacaatgtcaactatttggcccttttttaataactctttctcaaatgctaatattaataaaatcttatctgatatagagcatgataatgctacaaaagattaaacaacaatcaattgctaataataataataataatagcagtagtagtactacttactaataataataataacaaattaatatcttcaataccaatatctttgaaatcaatccccccctcaccgccatctccctctctatcccattcttcatctccaatcccaatatcaatatcagctctttcaactcctactctattgttgaataatgatgataataacgctaccaactccaccaactccacttcacctaatagcaataacaacaatagcgaacttaatcagtcaataacttcggtatcacctcatgttgcatattccccaaatgctaatcaatttaatataacagcatctcaattattacattcaattcaaaataattcaccttccccatccccattatcttcaaatattaatatgaaatcaagtcataataatgacgatagtgatagtgataatgatgatgatgatgataatgataatcaaaaagatgatcaagattattataatgataatcttaataacaataataatgataccactaatacaaatgaacccctttcaggtaatgaaagtataacttcaactctatcatctgataatactcaaccattatttgaattctctaaaagtaatataaatgttcatcttttcaataaattattagatcaacctaatttattagatgaaattaatttatctaaaaataataaattaattgattatttttcaaataaagatgttgtagatacaatgttagaatatttattattctctcttgaattatcaaaatttacatcagattcctacaataccagactatttcttatctcacgatatctttgctacaactgatgattcaacaacttcaaataacaattcaattgatgatttatctgaaaatatatcaaataataataataataataataataataacactaataacaatagcagataatacccaagttgacaaaaatgatttaaccgctgaaagtaaattacaaactgctttacaaagagcaagtataatatctgaaagtaatgattttaccttcttcaaatattcatcaaactttattatcgaattttgatatctttactaaattatggagaggtttctttaatagtgatccgaaattcttttttcaagacatccatctaattaaatcaaatgatgatcttattactgatagcaatactaataatgaaactacttcaattgatgaaaatataaatataagttcaacagatttacagaaactttcagaattagaggaatcaaataaatttgaaaatttaagagatagtcatgagttattgatgtttaataattttttgaaatttgttgatgatttagcattgattaatatttctgcatttatgaattttattagatttgaacaagataattatttattaactaatcaattaattaagtttataccatactctcaaacagtttgtgatttattagttcgtctgatttcaactgataaatcttataattcaaatggtttaattgatattttaattgatcaaaatttaattttaaatttattaaaaatttgtgaagaatattatttagatcatcaagttcaagataatatttgtaatttattaaatggtattgttggtattagttcaaatattggattttgggaagataataatgtaaatacaaatgcaaataataattcagatgaacaacaacaagaaattaattcaaataatcctaatattggtccaaacaatttaacaagacaattaatctctgctgactgtattaatgaaatgttaaatattatattgaattatggtaattatgggttagttacaattgtatctgttataattgaagttattagaaaaaataattctgattatgatgaatttgattggatttcatcaattaatgatatacctaatattaatgaaaatgaaattaatataaatgatacaaataaagataaagataatgacattaataataataatgataacgacaataatgaaacaaataatgaaaaacaaaaagaagatgaagatgaaaatgaaaatgaaacacaaaaagacagtaataaattagaagacgataaagaaagggataattctattccatctaaaaatatgccaagttcaagagatccaatctatcttggtaatttattaaaattattttcacttaatttagataaaattactgaaacttatcttacaaataaattttatgaaagaaaatgtaatttaaattccaccaaaaaactgaaaagttcaattggcgaaactattgaacctttaggatatgaaagatttaaaataatggaattaattgctgaattattacattgttcaaacatgatattaatgaataaatcaattaaattagatgaattaatctgtcaaagggattcattaagagataccaaaaatactgaacaattaatgaatgatgcaattaatgcattaataattaacgaaaattcaaatccaaataatgatcaaaataatgaattaaaattaaataactctaaatatattaaattaccattagatttatcaattggtaattttttcaaatatcaattattgaaaacaaatgcaataccattaattacattaaaattagttaaatttccatggaataatttcatgcataatgttatatttgatttaattcaacaaatttttaatggtagattagcaaattgggatgaagatagagcaattaatcaagaagagacaatttttgatgataatttaagtttaaataaaattttaatttggtcattatttggagaatttgataattttgaaacaatcgatgaaattgattataaatgtaataatttaaattatccaggatattttaatttatcattatttataatttattgttataaattatcaaatgaaatgtatgaaaggacgaattttagatatggttatatgggtcatttaacattaattgcagaagaaattcataaatttcaaagttatgttgaaaattttggtgcaacaaagaatgagaatgcatttggattacataaagaaattgaagataatataagaccattttatttgaaaagttcatattttatatttaatgaactttatgaatgtatttttgaaaataagggtaatttccaaccatggttaaattttgttaataatgaattaagagagattagttcaatgtataataaagttttaggtaatccaaatgaaattgaggatactaatgttgaaaatgatgtaactgaaaatgaaagtgagaatgaaggtgaagtattagagaataatgatgaaaataatttacatttaggattaagtagtaaggaagttatggaaaatatcaaacttgatgaaccaccaaaggcaagtaatgcaattattttagataatggagacagtgaagaatttcgtagaggagattctaatgaataatgacaacaaaaagaaaacgattaatgtaaaataaacgattaatgaaaataaaaaagcgaaaattcaattcaatgactttatttttttaaaaagaacaattttttatagaaattatatacaatataaaatacaaaatataatattaagattaagattaagattagaaaactatatcattaccaaattgttgagttaattttttaatattttcttcaagatttgaatctttaattaaatctttcctatcatcataacaatcatttaatgaaggccatttactattatttgtaaaattagaaccttcataagaaattaatgattgagtatcactttcaataactgatgatttattaaattttctaccattattatttgatgttgaatttttattattattattattattatcactattattattattttcattaattcttgataattgaactgatgataattgtaaattatctaattgaccttcaactaaacaacctttactacgataaaatttcaataaattattccaaagtttatccttattaagtacttttggattacctaaaatcattaaaccatattttgccctagtaagtgcaacatttaaacgacgaggatcacgtaaaaatccaattaattgttgagaatttgctctaacacatgaaagtataatataatctttttcacgaccttggaaagcatcaactgaaacaatctcaatttctaaaaatttttctctatcctttaaatttgaattcatttgaatatattgtaaaatataatttctttgaccttcataaggagttataataccaatttgtgaaggtttaataccatctttaaataattttaataaaattttttcaacattaattgcttcaattctattaatatatgaagtacctgacattgaaatttcttccctaccataaattgcccaaaacatcattggtaaattattaattggccaagggaaatttgaatttaaaattaatctatcttcatttgtaataccattttgtaatgaaccatcataaaacatattacttgggaattcacttaaacatggatgcatacgatattgaacttctaatctaattggtgaattacctaatataatcattctttcaaataatgattgtcttaaacctgcatcacttgcatttttatttaaaataactggacctaattgttgatgatcaccaactaaaattaattgtttacaacctttaacaattggaattaaagattcaggttctgaagattgagttgattcatcaattaatactgatctaaatttaaatttatctaatcttttatcctttgcacttatacaagtacaacaaattatatctgaattttttaaaattttattttctaattttttaaattgattaaaataagttgaagaatctttatcatttaattcaccaattgaatcttttaattttaataattttgataaaacattatttgcatttaatttaattttttcattgagagaatttttcaaaattgatgaatcaatatcttctttacttttagctaataatcttgtaacatttaaacccatattagataatttttcagttaaatgatcaactgcaacatttgagggagcacaaacaagtattttttcatttggatataatttatttaaatgataaataattgttgcagaggtaacagttttaccagtacctggaggaccttgaattaaagtaaatggagattgaattgcatttttaacagcaaataattgagaatcatttaatgagggcatatttggaattgataaatcatttggtaaattaatattaaatttaacatcattttcattaataatttctaaacctaagattttattatataaataatctgaaattgaagtagaatcaagtgcaaaagttttcattgcatcttgcattctttcatatgagatacctttccaaacaaattcagcagtaaatctattattaacatgtaatggaggttcaattaatttcttattatgatgattgtgtcttgtattattagattcagtaccattttcatctaattcttcatgaaaataataaggatccatttccaaagtataagtttcttgacgagaatcaggtaatttaataatataacctttaccaacccagggagtatcaacttcaggaccatcatattttaataacatttcatcaccaattgaaacttttaattctgaggaatcaattgttgaaaaatagaaagaagctaaatttttattattaagagattttgaccaatcaattgaaatataatttaaacctttactttcttttaaagctttatcataatcagattcaattttaactaagggagcaaaagatctttgatattgataagcatcagtataacgcattaagattggatcaactttaatatcttcaattgaattactgttttgagaattattttctaaatcagataaagttgaatttttatttaatctccataaagattctaatttattaatttgatcaattgatatattaatatttgaagtatttggtatattaacaatccaaggtaataagattctatcttcaattaaggattgccattgattagtatcccaattttcatccttttgttgagaacaaggtaatctacaaagtataacaataacattttcaattttagcagatacgaaaccaagtacgaaaatatttttattaccacaattataacattctaaagttgaatcacctaaatctgaatctggatgtaaagaaattgaattatgttttgaaagtactgcatgagttattatatgagaacctttatttgaagaatttgaatttgatttaccattacaaaaccatttattacaaatttcacatttagctaaacatttaggatttgaaatagaacaataggcacaagatgggatatttgaagttatgagatccgtatgatcatctgtatgttcatcaatatgttcgatatgatgatcaagatcattatcagacataatggttgttatttcccgtagtaaatcaagaagaaagtagtggtatataaatataaaaagtgaaaagaggtataaaggaagaagtgaaaaatttaaagtgaggaaattgattattggaatttattactgctttggacgactgcctacaaagctgtttcttagttctctcgtacgtagatggaggtaatcgtgggctgaacagacgtgtagtagtggtggtagtagtagggaggatgtagtagtattggtattggtagtgttagtattattggtattagtactggttatctctagatcatcttcaaaatatgatctgtcagtatcaggattccagctttgtattgattcatcatccgttgtagtgctttcaattggatccattggatctataggttcatttatcattagtttgttgaagttattcactatcttgatcttattagtcttatttttattattattattattattattattattattaccatccagttcttcatcaatactcgtctctctatcctccgctatcccttgaatagtcgatcttctctgtagttttggtaaaattggatttgcaatagtattagtattaatactagtattagtactaggactagtattagtactaatattctccattttttcataattaactaaatcaagataagaataaaaacttattgatttcctctttggagataatacattaactgatttcgatcttacccttggattgatcatcggtggtaaatcatgatgtgataatgatctaaataatttgatacacggagttgaatgtggtacttcaactaaatcagttgaattaaaattattatcagaagataacatttccacagcagagtctaacacgggagaggtgacattctcatccaaatgacgagacacgctctcacactgtacatttctttcaaacaagtccattgaagaaagagaataagatacagataatagaataaaagctgataaaactataatttccggaataccttgattttcgacaagacgtaattctgtataattatagttttaatatttacttgtcgtaacaaggtagtgattaatttgtaataataattcttgataattaataagtataaaataagtataaaataatgtgtaaataatagtaataataataataaatgtaataataaaataatggttgcttaatgtgcatataggataaacaattactttagcgacgcgtctaatgggatcttaatcagaataccataatacttacctccccgaaaaaattgtatacccccttctattcaaccgtgttaaaagtttccttgaaaaattgtctttcttgatcaccaagtttagttgaaaaatcagcaattgatcttaagggagatccataatgttgaaaagctggtcttaaatgaataagattatgagtgttcttcataactttaccatcatgtccatataatttataggcatttttatctaaaacttcagcaactacaaacggaccttcgtaagatgggtcagttttagttttcttcattgacttctttaagtaaacaaattcgccaacactataaccattatgattgttctttggatcttctaataacttcaacatctttctagccttgaactttttattaccagttctttctcttaatgcagatagtttcttttgaccttctaatcttagaacataagcatcataaccaatgatatcatccttcaaagaaaattcctctaagagagaatttatatctaaaacgatatctaatgaactatctttgaaaaacttttgataaccgaaaaccagttcagcaggtgaaacatcaaaaattgtagttgaattattgtaacagtttaaagcatacatcagaacatctggccatttcttcatggtaatagtttgagatttaagtaacttttttaataatccattgactctttcaacctttgaattagcttgtggataataaacactagaaaaacgccatttaatatcaaatttctttgctacttcttgagtataataactaacaaatggaccaccgttatccgagacaattgtttgaggtactggaaaataaacaaacagatcctttaaaaatctaataactgtatcggcatcttgactttcttcaggagttgcaatacaataaccactaacatattcaacagcaactaacatgtatttacaatttgtttttgtttttgaatatgtgaccgatttcgtaggacctacgaagtcaatatgccaaagttccccaaaatttggagtcttcacttcttgcataacagcaggtaattcttgaaacctagtaaacaaatcacaatgatcacaattcttcacgacatctgaagcaattaattgacaacgtggatgaaaaatcctttctaataccatcaaatccattaacaaatttggagttccatgatgttttctatgccattcttcgaatagttgaatgcattcaccggccttgatcaccttaagcaacaaattttgatgaataaaatataaaacatcatccttaacaacaaataaagaaacaagtggttttaactcatgaaaaattttctcacgatcagaattttcttcttccattccctcgacatcaggattttcaattaactcggttaacatctccaatttttcatctgatagaccaccgaaatttcgaacttgttttgattgaaaaataatcttgtcctcctccatttcgtcatttggaaaacgaactgcacaacattgaatatgatcaatatcaagtaatggctgttcagtaattgaaaaacgacttacaaagtcagcataattcgtatttcctggaatatatttaattgttaagggatatgtggataaaatctctaaaaatttcaaaatcctattgttcaaagcacaattcacttgattgattgtagctaaagccttgtgatcagtaaaaacaacgatatcagttgaaagtaataggtaattgtgtgtcagtgccataataatacctaagagttctcgttctaatgttgaatatttctgttgtgtgaccgtgaaagacttagaataaaaagcaattggaattaacttctttggatccttatcccatttttgcagaaaaataccaccagcacccagatcactagcatcagtgtaaataaacagagtttcatttgggttaaataattgtaatccagttgaattaattaaggcctctttaataagggcaaaatttctatataatacaccttcctccacagttgaaatagtttttgactttaaacaagaatgatgttcatacaatggtttcaataataaagcacaatctggaatgaatgcacttaaaaaattcacgaaaccaatgaacttataccagtctttcattgttgtaggtaatttccagttcctaatggtcataaccttctcatcagttggaaatctcttaccatctttgattaaatatcctaaaaattcaattgaatcttcagccaatttaacctttttagctgttaatgttaatccgcatttgtctaattgtgttaaaattttatcaaccaaatccaaatgtgaatccttaccaactgatgcaattataatatcatcaagataacaaccaacataatgtagtttcgagtcatactgaatgtctttgagaacaaactgcataaaccttgtaaaaactgctggagcactagctaaaccgaaaggcaaccttttgtattcaaaattaccaaattgggtggtaataccaattctagcaccattttcatctaaaggaacattaaagtaggcactcttcaagtctaatgaagtgaaatgagagtaaccattcaaattctggattaataattgaattggaggaatcgcctcagttctaaactttaaagatttattaatttgtctaaaatctgtgaccactctaaccttatcatgttggatgataggaaaaactggtgctaaaacaactgaaccatcatcatcaatatctgatagaatattgttatctttaccttctttgatgaaatttagcacatgttttgcttggatggaattagcataaaacggtttaggtttctgataatcaaagttttctaattgaaccttataagtaaaaccgtgtgatggacttttcttaatagtatctttaaataattttggaaattttaacataatatcttccaagtatggtgttgttcctaactcagttaagctaatattctcgtcaccacaactaataaaatcaaaattcgatgtctgaatttcttctgttccaaaagttaaataactatggttctcatcaactctaaatttataataacctaatgaacccctaccaataattaattttggagtaccgttggcaggtaataataaacattttgcatgtaaaacaaattcatcaaaattaacatctaaataaaccatttctgaacaaacttcttcatctcctagagctgctttaactttataaaactttgataacttaaccttcttgataaattttacccactcaggtaagttgtccaaaaaatctttataaacaaaatcaacaactgcaccactatctaataaaacttttctttcttcattctgagttctattatttcctaaatggtaaacatctaattcgaataatgaaacaatgttatcgatattctcatcatcatcattttcttcaccttctgaatactgatcatcactaacatcactttcgttgattcctaatctttgttgaatgtttgaaaccaatttttcactatcatcattaacgtcgcaatcaaaattgcctccatcatgcaccaaatcaattgcattaatgttcttacgacccatgttaccattcttcttaccatgcttcttgtaggttgcaaagtttttggaacagtttctgcaattacaattttggcagaaatgttgattcttcttaaaacgattgggaatacccaaacgttttctttccttgcagttcttgcaatgacactcttcgcaccagaaaggattaacatcgtttgatctcttaggatacttcttttgattgtaaggagttgttgctaaagcattcactttcattgatgaaaaagaatctggaatgcgttccatacctaatctagtatagataaatcttctcaattctggtattttgtcaatttttgccagttcgtcggcatgctcaccatgtctatgctcatataaatattttctcaagtggttcttaacacgtctttctccacctttgataaaagagtatgatacactcaaattaacccaatccatgtagaagtttctaatagaaccatcatttggatatgtttctggaaatgtgtccagttctgtctccttcatggcgtcgtatttgtcaaaattaaatctagagaatgtataacaaagcaattgaatgtaatcttggtattcaccagtttctgattctgggtaatttcttaaaatagtggttttgtagaaattacaccattttgtgaatggaacacctttcaacgctagcaattgttgaaactttttggtagcagttacaatttgttggtcggttggcctttttggtaaagcctcacgaatcaattcacttgcgatcttcgcttcatctaatctgccctcctggtagaaaatttctttcacaatacggttctgtaaccaaatctcttcaaacatatatttttggatattcttcaaaacatcacttaacacatcgataggttcttcgacactgttaacactagtaaaattcctactgttagccatttgaagcttcttatccatttctgcaagataatattgaaatctggattcatcaattctaacacctggggttgtttctgctgcttttaacttcttgtccatctcagctaaatagtactcgaactgagatgtgtcgatcctggttcctggatttgaccctgcttcttctaaggccttaattcttctgtccatatcatcttcaaaaccatatactctatcgaaaccatcttgagcagcagtttcaatcgctttctgttcttcttccaactctttttctttctgttctaatgcttcttccttttgtaacaacttcttttcgtcttcaactatttgatttaaggttttttcaatagcttcctccttcttgaacaatatttcttcatttttaagcaattgttcttcgtttttaagcaattgctcttcttctttttctatttttatctccttctctaacagtttctttgaatcctcaatgatttgctgttcatttgaaaagagttgctgttcattgccgaataattcttttctttgagcttccatttttgagttcattagaagcatagccttctcaaccgcactatttatttgtgattgttgactttgttgcagttttgcaaacagttcatcaaggtctttaatgtttgacattttactgtaatataagttttttttttttttgttcttttatgttttttttgtgtttttgttaataatataatagtttggataaggtttttttttttttttttttatttggacgataagtttaatttggatttgttcttgaatttaatatttcaaattacttataaaaaatattttttataatttccggaataccttgattttcgacaagacgtaattctgtataattatagttttaatatttacttgtcgtaacaaggtagtgattaatttgtaataataattcttgataattaataagtataaaataagtataaaataatgtgtaaataatagtaataataataataaatgtaataataaaataatggttgcttaatgtgcatataggataaacaattactttagcgacgcgtctaatgggatcttaatcagaataccataaaaccttccttatataataaactttcttccttaatgtaataaaaatctcctcactttaaatttctcactgtggtcatttctctctctttgtttactattactattacaacggtcatttcttatatttattgtatattctgtgcttttagtaattactatactataatctaatcatgtcatcaacttctagagctattgatgctcttcattcaactattgatgatctcactattcaattggcagaatctaaatcaaccctatcagagacaaaacataaatatgaaatcttacgtaaaagaaatgaaacaatgttagaacaattatcaaatgcaaaacatcaagctgatgttgctgaatctttacttaaaaggaaagaacgtagagttatagatttagaatctcaattacttaatatttcatcagatttccatacttcaaaatttgaaaatgattcactaaagtcaaatattaaatctttgaaaattgaaaattttaatttatcaaatgaaaatgaaagattatcacattcttatgatatgttacaatcttctttcattaattataaaaatgatattaatactaaaattaataatttacaaattcaattaccaaattttattaataatactgttgataatttacaattaaatttatcaaatttaaaatcaaatcaacctgaaattcaatcaaattttaatattttattgaaaaattctaaaagattagatgaattatataatcaaaaatataataaaattaataattatttattaactttaactaatgcaactaaagatcatggtttatcaacttcaattgttttagatcaatgtgaagatattttaaaagatcttaatagaaatgaagatgttttattaaaattgaaaaataataatgattcaactcatttgaaagaatttaataaacttagagatatatcaattaaatctcaaccaaattctcaatcaaattctccacttatctctgaaaagagaaaattttcatcttctccaagtcctgttcctgttccaatatcatcatcatctaatcctccttcattaccttcaactccttcattatcacaatctcaatataattcatcaaatgataccaataataagaaaaaacgtaatagtatgaactataattataataataataacaataataataacagtaacaattcaaattccaactctaataataaaaaatacaatcgtagatcattcagcaataactcaacttcaaactttcattcaaattcaaattcaaattccaactctaactctcattcaaataataaaaattcatatcgtaaatcattaaatcaagatgattttgctaatatgtcatttaacgactataaacaaagaattaattctaaaaatagaaatagtcgaaacttttctaataacaatcataataacaatcataacaaaaataataacaataatgataaaataactgaataaataaataaaaaataaattgtttatagattatatagatagtaaataaagatagatacattcattcaatactagaataaacctgtttatagattatatagatagtaaataaagatagatacattcattcaatactagaataaaccttcaatttcaccatcatcattaacttcaacattcataaatccacatttagttgctaaacctggaattgtcataatttgatctgctaatgcatataaataacctgctccaatacttgccttaatatctttaattgggaattcaaatcctgttggtacaccctttaattttgcatcatgacttaaagaatattgagtttttgcaatacaaattggtaatttattaaatccttgtcttgtatattcagcaattttctctttagcaacatcactaaatgaaacactacctgcaccatacatttctcttgcaattttttcaattttttcttcaattgtaccttctaattcatataatggactaaattctttagttaaatcttgtgattcatattctttattagcacatttaataacacctaatgctaattcttttgcaccttcaccaccttcttcccaatgatttgaaataattgcatcagttgcacctgcttcaattgatgcctttttaataatttcatgttctgcagctgtatcacttgacattttattaattgcaacaattacatcaacattatattttaatgcattagagatatgtttttgtaaattaatacaacctttttctaacatttctaaattttcacttgtatattcaaatggtaatggttgaccaggtttaacatcagatccaccaccatgaacttttaatgctctaacagttgcaacaataacaataacatttggttttaaaccacttgtacgacatttaatattaaggaatctttcaccacccattgtaaaatcaaaacctgcttcagtaacaacataaccttgttgttccttaatttgatcatcatttgttaaagattttgaagtaccagctaattttaatgcaattttatcagctaaaattgatgatgcaccaattgaaatatttgcaaatggacctgcatgaacgaaaactggtgtaccttctaaagtttgcattaaatttggtttaattgcatctttcataattgcagttaatgcacctgcacaacctaaatcttcacaagtaactggatcaccatttttacttgatgcaacaacaattttaccaaatctttctctcatatctttaagagaatttgataatgctaaaattgccataacttcacttgcaactgtaatatcaaaacctgtttttctaattaaacctttttcagttggtgcttcattaattgaaacacctcttaatgatctatcatttaaatctaaaactcttttccaagtaattgtctttggatcaatatctaatctaacaaatttactaatttcttcatttgtccaatcattaattttattaatatctaaacctaattttttaattctataagttaaaccaattggaacatctcttgaaccatcttttttaattggacataatcttttaaataaaccaatatcactttgagttgcttcatgaaacattcttgtatctaaagcagcagctaataaattatttgccataccaactgcatgaatatcaccagtaatatgcatattaaattcatccattggtataacttgagaataaccaccacctgcagcaccacctttaacaccaaaagttggacccattgaaggttgtctaacattagcaaaacaagttttatttaaaactgcaccaattgcttgagctaaaccaacagttgttgttgatttaccttcacccaatggagttggtgtaatacctgcaactaaaatatatttaccatcatttctatcttgtaatctatctaagacatctaatttaacttttgccttataagatccataaggttctaattctgattcaacaatacctgattcaattgcaacatcagtaatatgttttggaacttgattacgagaaatttcaaaatctgaaggaacaggtttgagtaattctaactttaatcttttaaattgtggtgacatcggttactgaaggaagggttaaagtaataaactaattatcacagaagaaaagaagcaaccagtaataactacaaacaatacaaattgtccataattaaattaaattagtggaatgtgaaaaatttaaattttttccacttagtaattttctattactattactatgggtcagagtcaattatattaagttttagtatataatacacacttaggacagagatatataatggatagaaatagagtagaggcagtggcaggattatgtgcaggattctcaactactctgctcactcatccactggatttctttaaattaagactgcaattagacacttcatcaccaaatcaattaactgcatttaagaaaatttacaatcaactagtttcatcaagtagtaataacaatggacaattatcatattataaatttatacagaatatctatcgtgggataggtcccaaccttattggatcaacatcagcatgggcattatatttttacatgtacagacaatttaaagatttaaatttattaataattaataaaagtaatgatgataaacatttaaaacattataattatttattatcagcatttttagcaggttggtcaacatctatattgactaatcctatatgggttattaagactagaatgattgcaattgatagatcatcacctaatgcttataaatcaataattaatggtatatcaaatatttatgaaaatgaaggtttaaaaggtttctatagaggtttagtacctgcattatttaatgttgcacagggtgcagttcaattatccatttatgatctcttgaaaagacaaattagtgataatgataatgatgatgataatgatggtaataataaatcattaactacattacaatatgtttatagtagttcaatatcaaagatgttatcaaccagtatattctatccattacagatgattagatcaagattacagatattaactacaaatccaccaaattattcaataatcccattaaccgtcaatataatacgacgagagggtatactagccatatataagggattaccagccaatctattaagagttgtaccagctacctgtataacattccttgtatatgagaagagtaagcaaatactgttctgagaataggagagagaccctctttattttatatagtgcgagtgtatctagttattgtatcttcttctacttctacttcttcttcttcttctgaaagtacatattggtatgcatatattggtgtgtaatggtcgtaggagaactttggcattagtgtcacattctcatgtgctcttgtttagatttattgaatcaactggtaaatgtgcaattgaattaattgataaaaattcatttatttcaaattcttataaacaattatcaagatctaaaaattatggtttcttaggtttaattgaaatgaataatgatatattcctttgtatgattacttctaaaattcaaactgctcaacctttaaaaggtgaaaatataaataaaattcaagatgtcgaattttattctttaactaatgatatttgggattttatagatttaaattcaaatggttatccaaatattgaaaatgatcaatcaaactcttcctcttcctctctcttcaaatgctgctactactagatcttcaccatcatcttctctatctccatcttcatcctcatctttatcttcaccatctcaaaatgatcttcttcaaagaatacctcaacatccttgttgggaattacgtaaattattatcagatggttcattcttctatagttcagattttgatctaacttcaactttacaatcaagaggtattaatattaaacaaagactttcaatggatcaatatcatactgattatatgtggaatgattttatgatgaatggtataattaattttagaaataatttaactcaatctgataaattatcattagataataatcatttcttaacaactgttattagaggttttgctgaaactttatcatcaaataattatcaaattacaattatatcaaaacaatcttggaaaagagcaggtactagatttaatgttcgtggtgttgatgatgatggtaatgttgcaaattatgttgaaactgaattaattttcaatgataattataatatgaaaatttttgcatttactcaaattagaggttcaattccaattttttgggaacaagatactgcacttatatcacctaaagttcaaattactagaagttttgatgcaactcaaccaacttttgaaaaacatttccaaaattcaattgcaaaatatggacccattcatatcgttaatttattatcaaatacaagatcttcagaaattgaattaagtaaaacttatctaaatcattataaagctttaattaataaaaataatgataattcttattcaaattcaatatttttcactaattttgatttccatcaagaaacttctaaaacttatgctgatgcaactaaattattaccttatttaatggattctttcaatgattttggttatttcctctatgatttgaaaactaatcaattattaaatgaacaaattggtacttttagaactaattgtttagattgtcttgatagaactaatctaattcaacaagttatttcattaaatgttttaattaattatttaaatttaaatcacatcaattataataatgatttaaaaactaaacataatacactttgggcaaatcatggtgatagaattagtcaaatttatacaggtacaaatgctcttaaatcaagtttttcaagaagtggtaaaatgggatttgcaggtgctttatctgatgcaactaaatcaattagtagaatttatattaataattttgttgataaaaataaacaacaaattactgatactttattaggtaaaatttcatcacaaaatcaagttataatttatgatccgattattgattatattaatgaaaatttgaaaaattatgaatcaaattttacttcatatgataatataacaatctttacaggtacatttaatttagctggtgcaaatcaaaataaaaatttaactgattggttgtttccttatgaaaattttaatcctgatattttcattgttggatttcaagaagtaattgaacttaatgcttcaaatattttgaaaaatgatagttctattggtgattattggacaaatgaagttgagagaacaattaaaaataatacaaatgataattatattttattaagatcagaatttatgtcatcaatattattattattattcgttaaatcaaatcatgtttcaaaagttacagaagttgaaggtaaatcaaagaaaactggtttaggtggtataactgcaaataagggtacagttgcaattagatttaaattttgttcaacttctttttgttttgtaaattctcatttaacttcaggtttacaatatactgatgaaagaaataatgattttattaatagtttcaatggaattagattttcaagaaataaatttattaaaaatcatgataatataatttggcttggtgatttaaattatagaatttcattaccaaatgaaaaagttagattattaattgaaaaaaatgatattaataatttattattaagggatcaattatcaattcaattattaagagttaaagaatttaaatttttcaaagaatcagaaattacatttttaccaacttataaatttgataaaaattcaaataattatgattcaagtgaaaagcagagagtacctgcttatactgatagaattttatttaagggtaaaaatttaaattcattagattataatattgcatcaattattaaattttctgatcatagaccagtttataatattttcaattcaaaagttaaaattattgatgaacaaattaaggatgatttaattaataaattgaaaaattctgttaacaataattcaaaattaaaatctaaatcaaattcaaataattttattgatttaaatgatgcagttagttcatcaccatcatcatcaactacaacgacaaatacatcatcatcaacatcttcaaatctgattgatttagatacttcaactacaatttcacctccattacctaaaagatcaattccaccagtttacaatgcacaagagactaaaaatatgttaataccaggtttaacaccatcaaatataatggaatctacaatttctacaaatactagtaatacaaacacaccaccaaaattacctacacgcaaaccaccaccaccatcatcatcacaactatcaaatactcaaatagaatctaatacaagtaataatccaagtttatcatcatttcaagttatggcaccaacactttccagatcgggatcattaccaccaccaccaccaccacctagaaaatcaactaatatgatacacggtgaaagtaatactacagcatcatcatcatcaacaacaactactactacccccattgtcaattcatccagtcccacaatgccaaaagaacataaattttcaccaattgttccaacaaagccaaaagttttaaacactatttacaatgaaaataccagtactaatagtactacttctactaacactaataatactgctatacctactaccacacccacatggactgcaatggcaccaactaagaagctgtgatacatctactcaagcaagtccccatcactcaatcaaagggtcagttcggagggaacggctcagcttccgaggaaattcaaattttttcttccccaatggtacctcaacttatgtctggtactggccattcctgtcccatctcttgtacaattgttagagtataataaggtaaggtactttgtttataagtaattgtatatcctcctctatgtacttcttttctcaaagtaacagaaaagttttttaatttattttgacttctataatatgttatcaacaagcagaatgtttaaaactatagttataggagctgcaggtttgtatgcagttaaagtaattgcagattcagaacctccaaaggcttatgttgcacaacctaatgaacgtggaattaatgaaaatggtaataatatttacattgcaacaaataatattaataatggtcaaaaacctttggaacataatattgatgatctgaagaaaaaggttcaaagttttggttctgaagcttcacgtaatgcaatgtcaatttatgatgatgcttataaaagtctccaacaagcaaaggaaaatttagattcaagtaagggtaaaaaaggtttattttgggcttcaagtggtgataaacaattacaagaaaaatatgatgaagctaaaaagcatatgaattcattaaaggattcattaaatgattatattacaggttctgattcttcttattggaatggtattactggtagtattaaagatacttatggtaaagcacaagattatatcggtgataaatataatcaattaggtggtaatgctgaagatactttaagagaaaatttagtttattataagaaacaagttgaagattctaaaaaggaatgggatcaaactaaatcttcttggttacattggagaaatgctcaatctcaagaaattcaagatagagcacaagcaaaatataatttttttaaggcaaagaatgataatgcaattgatcaattggcagattatctatcccaaactggtaagcaagcaaaggatatcattaatgaattaggtgatgaagcaggtaaacatttaaataaaattaatgataaagcagctaatgttggtcatgatatttcaaagaaaggtgctcaagttaaagatcaagcttatagacatgcacatgatgctaaaaattatgctgctgatgtaggtggtgatttaaaggaaaatattcaagataatgcagagtatgcaaagcattacgctgccggtgctaaggatagagttgttcaagctggttatgatgtcaatgataaaattaatgaaaatgcagaatatgttaaacattatgctgctggtgttaaggatagtgctgttcaagctggttataatgctaaagaaaatattgaagataatgctgaatatgcaaaacattatgctgctggtgttaaggatagtgcggttcaagctggctatgatgctaaggatcaaattaatcaaaatgcaagatatgctaaggataaagttggtgaacatgctaattatgttaaagggtatgcagaagatgctaaagataatgttgttcaagcaggttacaatgcaaaggatgcagttgaagacaatgctgaatatttaaaacatcaagcagctggtgcaaaggataaagttgtacaagcaggttatgatgctaaggataagatttatgataacgctcaatatgcacatgatgttgccggtgatgttaaagatagagttgttcaagcaggtacagatactaaggataaaattcaagatgatgcacattatcttaaagattacgttgtcggtacaaaggatgatgcggccaaagcaggtaaacaagctaacgaaaatataaaggataatgcacaatatgcaaagaataaattaaatgatggtgctgaagaaataggtgatcatgcaaataattatatcgaaggtgcaaaagactggatttctcgtgcaagtgcaaatactaaaaactttatagttgataattacaatcatatgtggaattcattaggtattttcagtgcacattctcaagaagttgcagaacaagcagttcaatattatgatgatgaagtaagaaaagcaaagaaagaatatgatgcaactcaagcaagttggttaagatggacaaaggcacaatctgaagaggcacaagagcaagcaaaaaataaatgggaaattttaaaagctaaaagagatgctgctaatgatgaattgcaaagatggatcaataagaagaattaattaatttcatcttttttttgcaaattacaatttttttttcagttaatgatatatatcttattttttggtaattatttttggttatttaactcattataatactttttattttatatttatttacatttagttttaaattatttttacgttgtacattaacgatgatatatttgacacaaattacatgtagttcaccagccacttttttataattttaaaaaattgaaattacggctgatgtgatggctcaactttagttgaactaaacaataaattagagattaatgactttatttaaattgatgaactatatagtatttctacagatatataaataatcatgaaagatggaatgcaccattgccctcggtcatagcttgtgtaattcttgaatacatgacatcatatgtagaataacatggtaatttaagataatttgcacatgtcataacacttggtaagtaatcttcaggttttagatcgtcttcacaatgttttaaaacaactgttaaagttggtgatagtccggcaaatccatcatgtggtaatcttggagatccagtgacaaatttcaaaaagtttcttctttgatcaacatcaaattttgacattatttcaattaaccatttaatttgttgtgactcgctattgtaaccatgatcagcatgaatgacagagataagaacttccgtggaccagttttcaacttcgttaccagtaagtcttgtaatttcatttggtgaaaataatttcaatgatttaaatggaagaatttcagaaaatcctttaacaaaagacttaataggatcagaaataccattataaattgtataatcaacaattaaatcaatgtattgagatatattttcacttgtaactgatatttcatccccattgggtagcaattttatattttcataccctggtaaaacaaatgttagcattaaatctgatatagttgcatctgatattttcacattttcgtgttgttcttttggtaaatgtttaaactcttcaagatataatttcaaatgatttaatgaagctgcaagatttggatcaatttctgatatcttctctatagacacttcctgggtaaatttaaaattctgtgtcaaacaataatacatagcaagttcaaaaaatagtggattgaaatggaaatcaactaatcgagaatctaaaaatgatcttgctaaaaatttacctaatattttaaaataatataatgccttagcataatgtggatcactttttgtagttggtttagggaaaagaccatgaacctccttaacatacatttatcttgttcttcaatgctcagcttttcgagtttatggtaatcaccacttctccacatattcaaattaagcttgctaaattctcttgatacttccgaataaaattccaaagttggacctaaacctgacccacattcatcaaagaattcaatttctattaaaccaggatttgaaccataaacttccattgttttaatggcactcgcaaaaatcttgtctctttgaactctcaacttatgtctagcagatcttccacgggttaaacttctacgtaaaaattcattggcttcggattgttcatcagagtttgaactactctctttagctttatttgaccaataatcgattagccttgaatacccaaaagatgtagattttaaaaatgacaatcttgtttcaattggaaaaagaaaaggaaactctctaggtataattgaggcccaatctggtaatatatcacttgcaactaataatggatcatccagctgacaattaagttttgcaattagtttgtagtttaaaaatgcaatttctgatgtacttggattggggactgttgcgtttattgaatgcaatgatttgagtaataataaaattgaactaatttctggatctccaattctattaatggtatcatcaagcgattcattggaaataataccttcattaggtttgtactttccatcaacaattttatatttgacattgtatacttttcttagaataacttcctttgcaactttcatattttggaatccatcacctgaatatttatagacggcaccaaagatggttgattcggtaggtaccttaacatctttcatgtaaaactcaaaatgttgttcatcgtcacttagaggagctccgttcattttggacctcaagctaatagatttagagctatcaaaaaatctttgaattgtatcgaatgtaccaattgctggaacagaaagtgtgacagttttaacatatgttgatgggactgcatcataagggatcaaattaactttcatttgacgactcatcattagtagcctttgctcttatggtttgattagcatccaaatctgctccaaatatttcaaatgtttcatttctatctaatgcatcttctaaaattttgactaagaaataaagtggagactccatttgaacgatacacggactcaatgctgagcaaaaaatatacttgaatgatatcaaagcatgcaggtttcatgattcttctccttttcgaatctttctagtaaactgatcaattattccagatataaccaatccatatgttgacaatgaatttggatttcttttacgatctaatatactagcaaattctgaccatatattatcccattcttctttagataactcagaactttcttcaactaaacacttctctaaatgttccatgaacaaatatagataatttgattcatcttgttatggaaagctttattttcagatgttaatggtttcaatgatgcgtaaaggactgttcaaaatggttttgatagattgtttagataaaccatcattcataatactcagttccaaaacatttacctttctaactgtattgaaaaagctagtttcctcttccatcatatcatcatcaggatcttcttcatcatattcttgatcgtatgaattattatcatctcatcagttactactattcctatcgtcgtactcaagttcgatatcgccatcgttatccgtgtgagttaatttactaatttcatttttaatgtttgtactcaagttatccagttgagtaaacattccttctctacttaaatacttggtaaaaagttcagaatccaactccatcaactttttagtaatgaatatagcaccaaataatagagtatatgattttatggtttggttgtcctttttatcaacaatttttttaccgtgggtaatagatgatgccaatatcaatgaagttttcgaggaacaaattattgattcaagttgatttttgttcattaaataaatgaaacgaataattaagacaaaaactaatcttctagttttataatcaacagttgcatcgtatacattcagaatgacaggataaactgtagtaaaaaaattattcaatacttttttgttattatcgccgttgtttaacaaatcaaattttgtatcatttatattcaaatccttttcattcatactgaaataatttccaatgtctgaactatcagtaatattaaactcactagccaaaggtatcaaagttgaaataaactttaaaatagacaatatcaaactctttgggacaatttaaaagtgcgtcaattgaaacgatttcttgtgtattggttgattcatccatacttgtattggtggattcttcgttttcatatgatgaaaatgtagaggttatcattgaaggaacatcgcattttagtaataactcatttgaaaatttaggagactcggatgataacaatgttaatgaatcaagtaatgcgagtgatgttttgaatgaaactaagcctgatgactgtttattattgttcgtaaatggagcaaattttgtgaacaattgtttcataaaatcggcatcaagtaaatcgattaaaataggattatcataaaaattattaataacatttgataagaaaatccaagaatattcaacacattgactatctgaataattaattgagacatttttaatagttggcaaaatggttgaaatgtcattgaaacaagtacctggaatatatttgaaactagtagaattggaagcaatttttaaagcttttctttgagcatgaatggtaaaaaaatctaaatatgataaagcaataggtattgatccttttttcaaacattgtagtccacattttctagaaatcatttccagtgcttgtaatgcttgttctgccatatctatatagctcaaatcagccagtttttgatttaagcattcaacaacaccagctgagacaatctcattaatcaaattaaaattcacttctgtaagattatagatacatctgcaagctactaattgtaattcaagatgatctggatatgaattaattgtatccacaagtattttagcgagtttataagttggaacttgacgttcagattgcagacttgacatcattaataaagatgtggaaagttggttaagagtttccatgatcatataaggatcattatgagttttcaatccattcatcaaaccggtaatttcagagtttgaagaagatccaaaatgatccatgaatgagtttataatatttctatttctttctctacttgaatcgacaactgaagatgatgaatcaattgtatcagagctgttggtatttctgttattgaaaaacccactaaaggcttctaacgggtttgaagatcttgaagcacttaaagcactctctaacattctaagtgcagaatcagcttcaatttcatcagattccaatgagccatctctactagcttcatcattatcatgaattgttatcatttttatcttcatcattatgattattatccatatctccaaattcttcataatctacatgataactttcattagaatctaaatccattaaaccattataggggtttaaattcctggttgagatttcgacattttgttcaacggattcctcctcttcaggatttaacaaagctatcatttctctagatcttcgagtttctgaaaatttcctatagttccctgtaagtctttgaagtgcagactcctcatcttcattttcataatcatcttcgttttcatcgtaaccattaccaaccttatcattgagagatgattctttaaaatcattatcagaatgagcatttgtcgattcgacatctttctctgtctcaaattcaacgaaatctgtattttttttcatgatttttttcatcaacttctgatcccttgaatataaatggttgattaattaaagaaatgcagttaatgaaggttattttaagaagaaacaagccagaattgtcaaacaaatgctcatctactccttttgccctctcgataaagtgaaactgcttcccaatgaggaaagcttcgttacgtaatttttatctttttttccaatttttttagatttttgaattttcacagattttttttttttttaactaaaaagtctgaaaatttttttatctttcttttcaagtggaatttaatgaatcttttgattgatcttcaatcaatatcaatataatacattacaatgcctagatcaaagagaagtaagcttgttacccttgcacaaaccgatagtaaaggtagagaaaataaagaaagaatttttgatgaaatcagagaaggtctcgatacttacaaatatacatacatgcttggtttagatgatgttagaactcctgttttacaagatattcgtaaagattgggtaggatccaaactcatcttaggtaaaaagaaagttttacaaaaagcattaggacagtctcctgaagaagaatataaaaatgatttacataaattatcaagattcggaaatggattaattggtttattacttactgatgaaactccagaaactgtcaatgaatattttgattcatatgaaagaaaagattatgcaagagctaaatcaagatctccaataacgtttgttttacctgaaggtgttgtatattcaagaggtggacaaattccaattgaagaagatgttactatgtcacattcaatggaaccaactttaagaaacaaattcaagcttccaactaaaatggtacaaggtaaaattacattaactgaaccatataaagttgttgaagaaggtcaagttcttgatgttactcaagctttaattcttaaaacttttggtgttgcatgtgctaatttcaaagttaaagtttacgcttaccatgatggtgaaaccaacgaagttgtcgcagttgctaaagaagataactgagttcatattatatttgtattgtaatttctaaatagttaatagtaataaaagtaatcaaaccgtttacattatcaccgcttaacaccggcaacgccagtatcccagatatcattttgcttttttcgcgtttcagagaaaagtttggtgccaattcaattattcgtggttttttaaataaaataaaccattctcttacaagcctgttggtggatgcatttttaggtattttttggaaattctgctaccgtttgatatctggataaataataaaagaatattcaatagcaaaggtttgaaataatgagtggctatagaaaaagtgactcttttttgagtcaaccaaaagtgggaaggaagacaggtttccaagtaacttgggacaccaaagaggggacccaatggattagaagatccaaaagaattctttctttcagatgaggaatttgaatcaactgagctaaacaatgcaacctctccaaagaaaagattatcaatgcgttttgatcaattaaaaaatattgaaaaccaaaataaatccccaaaacaaaatgctttaattgaagagaatactccaagtaatgagaacgatcagcctatatcaactaagtctccatcacattttgaaactgtcactgatattgttgaaaatactatcaattcaaattcaaattcgaaaaacacaagttatattgagaattcagtaacaccaacgaagaacaaatccaatgttccaattttatcatcatctcccttcgaagaagaattaaaatcaatggaatcaactaccgctatatctggtaatacgtcaaatggcatcaaattaacaaagaatatcgcattaaataagtttaccaagaattctaaatttcaaccccaaaatatagtaaatgcttcatctgaagaaagcgacaaagttgttcatcagtcaccagaaaaattagaatcagaggtgaaggatgtccaaaaatcagcagatgaagatacaactccgaaaagtaacaatgctgaaccagatgtcgtacctaaagttgactcaacaaataatgatcaagaggaaaatgctttagaaaaagaaactgataacaaaaaagatgacctgactgttgaagataaaagaaaaagtagtgacaatatagacgtaatttccaatcaatctgaatcgaaagttgttggtaacaagaaagatgatctcattgttgaagaaaaggttcaaaagattgaagttgaaaacaatacaagtgaaaaaagcatccgaattgaagaagaagaacaaaataataaagaagaatatccaatagaaaaacaaaaaactccaaaagctcaaacttctagtgtcaacattaaaaaattaaacgtagaattttcaactacagaaacttcattatcaacaccaactcctactccaagaaaatctaaaactacagagtctgctaaaaaaggtaagattttcaaaataaaggaagtcacagctaatgaaatttttgcaaaagttgcttcaaaggaagatcaaaagaattttgatagtgtaacatctagaaaaagcagaacccccagaaaagctgctactaaatatgttgctcctgttcttgatgtatcaactgatgaaagtagtagtgagagtgataatgaagctgagaaagagatgactccagccagtaaggataaagaaaacagtgatggtggatcctctgaaaatactggggaactttctgatgaatcgactgatgaatctgatgatgatatcaaaacaattgaaactgtatcaataaccagacgtgtcgtcgagagtgccagtgataatgatgatgaaaatgatgtcaacatatcgaaacatttaatagagaaagaatctgctcccaattcaccaatgaaaaaaactccagttaaaacagcaaaagtttctaaactagttgttccaactgagaaaaaaaaacctatcaaaacacaagctaaaaaggcacaattaccaaaaccacatgcatcaccaattcgtcgttcaacaagaacacgtatagcctcctattgcaagttggaaaaacgaaaaagttgtttataaaacagaaaaaatcaatggtgttatagtcaaatctgttgataatgtgttacatagaccagataatactttaggtgtgcaatccttctcccaatctaaaaaacgtggtattgccaaacatacagaatccatagatttatcagatactgaacctaaatccaaaaaatctgtttcaaaacctaaatcaaccaaatctaaacctaaagaaattgtttctaagagtgtaaaaactttaaacaaaaagactagtcctgttgctgtttcaaaagtagagaagaggaaactacaggaagaggaaaccaatcatagaaagaaacaaaaaactgttgcaacaaaaccatccaaatcatctaaaccagtcaagaccacaaaacgtgataaaacaccaaagtcagttgaaaaagggcaaccagtgaagacacaaacatcggttacagagttatctgctgatgagcaaggtgacgattctgttcattctgatattgatgcagctgatgatgaagatattgatgatgaggggattgatgatgaagatagtgatgaaaataataatacattaactgaatggaagaactccaaggataaagcacttacgatatctgtttttgaaggacctggcactgaaaagcaaataagaagaacagttgcatttgctcctgattcctataaaaacgtaacattgatcaaaaatgatgatgaatattttaaagtggggacattatttgatcaagactctgaattttgtggtggtggtatactagaattaccatcaggtgctaaaaaggcagttaaatcaaatcatgacacatattttatattttatgttatatctggtcatgttgaggttacattgagtaggaatacatttgttgtgacgaaaggttgttcatttgaaattccaatgggtaattattatcaatttttcaatactggaagtgaaatggctaaaatgatgtttgtgcaatccaaatatattgtaattggtggtgtagaatctgcaagtgatatggaaggttcagttattgaatccgattattgattgtacttgtttttaattttgtatattatatgttaaggtgtatactatttttgtaaagtaatacaataatggaatgataaagagataatacagaggattatattgaaacactataaaaatacagaatgattattgaataaacacgaataatatataaaatttctattcgtcttttgcctttatcttaacaacttttgaaaaatcaacatctactttaccttgagttggttcgttaattaactgtcttaaaatatctgcagctttcttcttgttttgcagttcgatagcatcttcaacattcctcttttcagcatcggagtacttgggtattgaatgtagaataggattgtttaatttttcagacatttctgtcaatgttggatcaattattaaatcttctgattgaatttcaaagatatttgatcttatcgcttctccgttggtattagagttgttttcaacatcgtttttctcgtctatactcttatggttgttgttatggtcggtaataattttagctatttccttcacttgttccttttccacaagtattctttcctccggcctgatttcttcgtcatttttctgtgagatattactagttagactaaattcaccattcttatttgcattggaacctttttcataagctataaattgaaaatctgaaacattattgacacttccatttttttctgataattgttcccaattaagctccttctttttcgactttactttttcaaatgatataggtaaaggatatgaacaatatgtacctcttctttcacatctgctacaagaaggatgtttttcatcacacttaactttactctttttacaacttgtacacccatttctactcctctttttatatcccttagaaacttttatacttccatttttctccatttttaatattcttttttttcaaattctagccattaatgttttccttccgatgaatgatatcaaaataaccaactgaaaatatatacagcttttgatctattcaaccgataaacaattgatataaatataatttaaaagtgattatctcttcgggtcacatacccgtttgagcagattttaatttctctatcattaaataaccaaaaaattaaaataaaagaaaatattttttctctcagtctcatcgacgtatgttgtaagatagtattcaaatcattaacattaatctatatcaatctatctaattctttacaaagcaatatacataagggaattataatctagactactgattagatgttattagttgttattaaaagcatctaatgtatccttactttgaggacgttcagttcctttatcagcattatcattatcacaatcatttccatcgaaatcatcatcttcatcatgattatcatcttcaaattctttttgcttttcatcacgagctaattgaactaatggtgctaaggctttattttcagaagcatttaaaataaatttggaatttaacagttgaacactattagctctattatcaggattaacttcaagacataaatcaagaaattcttgtaatgatggactcagactatctctatcctttaattctggtttaccattagttgtaattaaaaataatgcacgtaatggagtttcatttaaatatggtggttctccttcaatcatttcaatagtcataataccaagtgaccataaatcaacttttggtccatatgctttctttttaacaatttcaggtgccatccaatatggtgtaccaaccattgtattacgttttgatgcatgatccttaatttgtgcacaaaatccaaaatctgttaatttaatatcaccatttaaagataataaaatattatcagattttatatcacgatgaataatacctttagaatgtaagaatcttaaaccttttaaagtttcacgacaaactgcaccaatttgaccctcagtcatcatactatgtgttacaatatcagttaatgatccaccttccatatattccataacaacccataaatcttttttcaataaatatgactcaataaaattgacaatattaccatgttttgaacctttcataactaaaatttcattaataattaattctttctttggttgtttttctaattccatttgtttgatagcaacaagttccttcgttacatcatcaacagctgtataaacacctccagatgcaccttgaccaattttaactaaatcgtgatatctttcctttggatcactatctgaacaaatttcacgtaattttttcatgtatttgatatgtttagcacgacgaatttcacggcgtctctcttgttcttcttcagttaattctttctttgaagatgcatttggtgctgaaacgggttgtgcagatggtacagatggtataggaggagccgtcgtaatgattctaacctcatcattaacttcagagatctcatgcgtgacttgaccttcttcatttgaaatgattgtttcttctttagttacttcttcaatttctgtttctctattaatttcttcagtttcaccagcagaaactggaacaggtggtaagctttggtcaacttttgatattaaatttttatctgtaggtaaactcaagtttttaagaatatcctcattaacttcatcagtttcctcctgaataacatcactaacttcattcatggaatctaaataattcttatcattatttgaaagttcaactggtgatttcaacgatgagtgagagacatatgaagatgataatggtatttcattattaagctcattgatattctcattattatttgaaacaaccgctgtatcaacagctgatggaatgatactagttgttttaccgggtaacggaggtggagcacgatgtggctcaaaaaagttggatccaccagttttatttaagccaggtgatgaaattgaagactgtttcattaatgctggagatgctaatttacccttggtttgtaagaatgttccattcaagctagcgcctgcttgtgctggtgaggatatctgaattgggcctcctggatttgatataccttcagataaatgaacaattcttggacgattatctgaagagacagtacctgatctccttttaccaaatcttttggagaatgattccattattgatgtagaaggagaatttggtgtgcttcgattattggcagatggactttttagaacttgtttagatgatgttggtgatgaatgtttacgtgcattggttaaagatgcttgtcttgacaatgaagttttccttgaaactgaattagatgacattaaaacgggtgttgatggggagttcaattgtaaagttggagatttagagaaattatctaatgatgtaggaggtggtggtggtggtgcgtgtcttttaggaatgtattcgacatcttccggattggaagtattctgtgaaacattattaatgtttgaatcactaatattcggacttggggaataatttgcaaaactttcatactcagaaccaggagttttgttaagatttgcattggtattattattatgtttgtttaatgttgataatgatgactcacttgtaaaagaattattattaagatagccactattattgatagtatcttgggtatattcttgagaagaatctggattatagtctgctaaatcactatttgttgaggatctattatgaacgtccataaatttatcactacctttaccagataaaccatatgcttcagagtaaaatttcaaaacttctttagcttcaactggatttgcttgttgctcagcaacagaaattccttgagctgttaaaacttttgcccattctgatggtaaatctttaaatgtttgagtttgagagtcaaaactaacatgagttttcaaaatgacattctttggagcggaaatcttcagatcctgttgtgatgaacgactaccagaattcataccaaaagctttcgataatcctctaaataatctgcctttctttttcttttctggagcattactttgaattgaagttttcaatggtctagttttaatttcttgaggtattgaattagttcttgtatgacctttattaaaagtttcctttacttgttttattggcttttcagttggagttgaagaggtagactttttaaatgaatcagttggagattcaaaacttggtgatgacaacacattatagttatctattatagaattaaaatcgtgatctgatgaagctgatgattgtaaagcaggagtagcaaatggaggttttagttctttattagataaatcaagtttgagatcatttatatcaaatggtgcaacaactgattgtttctctattttatcctgataaagaagttgtctcttaggggttaataattgcatatcatcatcatttacttttatatttttaccttcgaaatgaccaaccattggtgatactttatatttatttgcattttcattatatgttgattcggtatctgtatttacttctgattttgaatcatcatttttcttaagactatttacagaatctaaattattattatcttcaaaatctgagtcaaagttttgattcagcattgaaggagttgagaattgaaaatctcgtaattctttaacaggttcaggagtataagcacttgaattatctaaatttggcatattaattcctctcttcactcaattcattaatatcttgttttgaaaaatcatctgcatctaatgtaatatcttcatccgtagtatcccaaccttttgaagttttaagattattcagatgttctacaagcatagcagcatctttattttctagtattggttcattatttaaagaactagtttcattaatattagaatctgaaatgagagcatccacgttgagggtggctctatggcgtggaagtgaagccccatcaatattttcttgaatttcttgctgtgaaggacttgccattactaatatatgatacaaaaagaaagtttttcaattgaatgagtgagtgactggcttatcttgatagatgataagatagataagataaatagagaagtattttaacagataaacaaaagaaaccttcaaagtgacatgcactcatcagtgaacgaatgttgaaaattgaaacgaagctgaaattgaaattgaaaattgaaaaagaaatggcagcgaaataaatttcgaattttaaatttagatttgcttctccttaggtatatatatatataatattctttatggggtgaacatgcaatactctaactttctgctggatgatactacattgagtatttagttgcattaaaactgttatttgtttgaaaaaaaactatatagtattattattatcaattattattattacttaattatgtacacaagctgaactattcatcactcttagattcgaaaacagtaagatgtttagtaccttcttcccaagaagcacccttgtaagtaatatccataactgccttaacgacatcatctaatgaaccacgtttttgagtagttgaatctctatctcttaaagtaactgaaccatcagcaatagtatcataatcaactgtaataccaaatggagtacctaattcatcatttcttgcataacgtttaccaattgatgcacctgaatcatcaactttaaatggaatttgtgcaagacgtaaagttttcttaacaatttgagttgcatcttgaagttctttgttattcattaatggaacaactaaaactttagttggtgcaactaatggtgggaatgataaaacagctcttgcagaatcttctggtcttgtccagaaacaatgttcaaaaactgaataaataattctaccaataccgaatgatggttcaataacatttggtgtatattctctaacataaacagttttcttatttttttcaattttaactaattctgatggaatttcaacagtttcagtagcaataccatcaattttagcagaaattttaaggttatcctttaattcagttgctaaattttctaattcacattgagttcttgaagttaaccattcttcaacttttggtgcatcttttctaaataatggaccaaattttttcttttcaattaaacattcatattcttcaattgagacaggttcctttaaagcttccttaacagataatttttccttagttttagcagcatgaacggataaatcataagcagatctatcagcacaaccaacacattcaatccaaccataagaagtttgtaattctgcatcccaacaatcttgagcataatgagccatttcatttgacatatgttgtctaaatcttaatttagttggattaataccaattttcattaagaataaataaattctaccaatgaaataacctaaagtttgattatcaataatttttttttcaactgcttcaccaattgaaatttctaaaatatcagttttaccttcttgttgaacttcctttgaaagtaatgaaatttttaaatctttaacagaatcgaaattcatatgaactttattatttggatcaacaaaatgttcaatttcagccattaaaaattctctaactcttaataaaccagatcttggagaaatttcatttctaaaagatttaccaattgaagcagaagcaaatggcattctttcattattaaaatctaataatttattaaaatttaagaattgaccttgagcagtttctggtcttaaataaccctttaattgacctgaaggaccaattgcggtttcaaacattaaattaaattcaattggttgttctaatttttcaccagttgctgggttaccaatattatgtttaatcattaattcacctaattcaggacctgaataaccatcaattttagctaaaatagtttcatattctgcaacaacttcatcatctaatttgattgctttgatttctttaactttcttctttctcttctttttatcatcactttcttcttcaacttctgcaacaatacctctagcttctttatcaccctttaatcttgattcaataacttcttcaactaaatgatcagctctaaaaatttcaccagtctttaaatctctacacatccaatcagcaaatttatcaacatgaccagaagttttcaaaacttcataaggtgtaagcatagtacaatcgacttcaagcatatcttcttcaagaacaaaatgttttctccaagtatcaataatatttgcttgtaaagcacaacctggtggaccataatcgtataaacctgagacaccaccatagatttcaaatgatggagcaaagaagaatcttctcttaagaactgattctaaagcttccctagagaattcagtagtagtattagtagcttgtgacatcttcttaatcttttgctttaaaggtttctttctaagagtatttaaaaaccttttaaatagcattaatttaaaaaataaatgaaaatagtaaaagtgtcagtcatttaataattaaaataattaaaataatttacttcactgtatgaaattgtccaaaaactgaatttttccagtgaaatttctcgtccaatttaatttctatttatgttacgtaatcttacacattaaaccttatatatctcttcaattataactgtttaacaagaacatctagatggaaatcctgtgatgcctctatatcgttttccagtttctcatctaaacaaccaccattattagctgttacgctaatcagtactttgtttttatagacatatccgaaatttttcgtataattctctcagttcatgttcactgatagctaaaacccaaatttcttcattaccaatacttgttttagcaaatttttctaatttatctataatatttgaaccaatacgtggataaaatgaaacaaatgatgttatttcatatcctggatcatgaggtttcagtccacacatacctaaaattttagattctgcattaattggaaaatgtaattcagttttcaccacctgcagatttatcaattaatacattagatgatgataaatgatttaataaatctaagccattattagtgtgtataaatttctcacgagctattgatgcattcatcagtttcatcaatattagcatctttatcactgaaagctaaaataagatatgatttattcggatatttaatcattaagtcttccttgattgagtttttaattcttggtgataaaataatattatatttgaatctaggtacattataaccacgatttataactctagttaataattcttcatgttttgataattcagtttgattcaaaactgtaaatatgatatgttaacattagttatcaattgaacaaagtagattgtagattatacgattattagagtttattgttgagaatctatattatacaaaaatgattatatgcacgaagaagaatgtaagaagaataatggaaaaacaagtgtgaaaagtgataagcgacaggcaagcttataataacgagcgctaaaagtgttatcatcaatgaaataagggatgaatgagcagtagttgcttcattcctagagacaataactgatgccgctactgatgatgatgaagcagaggttgcttcatagtattggacaaaatcagttggctcagtaggtagtcgatgatgtacgatgttgatgttgatgtaggagttgtagaagttgtaggagttgtaggagttgtgttttcagatgtagttggatctgcaactactggaactgaaatggactcaactggtgtggttggtctagttgagtgagagtgtttcatggtggtttcacttgtttttgaaattgaactggaactagaattggaagtggagctagagctagaactagaactcgaacttgatttggatgttgaacttgacttggatgttgaacttgatttagaatttctagccattgaacttctcaataaattttccaaaacatcttgttgaccagtattaaaaccagttctacctaaatctgaaatccaagttaatttatcagaaataataatattttcctctaaatatcccttaccatcataaatatatgaaatttcatttgagccttgcttttgagaatttgaaggtggatcataacattcaatatcaacagtatcaacagaaacatataaataaccaggatcaataaaatcacttgcattccaatcaattggaccacctgcccattcaattgtaccaggggcattagatgatgcaccacctggccaaattgaaaattgaatacgagaaggagtttgagggaattcataaacatttgaagttgaattcaaagtatctttcttttcaagtgtacgtaaagcaacaccatcaattaaccaagtaattgaatcctctttccaatcaatttcataagtatgccaattttcataagtattcgttgtatttaaattagcaccatgagtatgatctgcgattgcttcaaagtaataattagtttgagcagtttctaattcagaaccaacaaattcataatcaatttcatcttgaacttgagagaataaaattgctgcactaacaacacctccattatgagaagttttatatttaaatgaaactttaccataccaaatatagaatgtagaagatataacaccaccacttttattttgtggcattttaattacaactgaatcatctttatcttcaacatcaccataataagtaaaatcaatattagttgtattacctaaataatcattatcttcaatcatattatttgatcttggtttataagaacctgatttacaaattggtgcaggtaaacaagaagttgaattaaaagaaaatcttggatcacaagtacctaaacacatagtacctgtaccacaagtacctgaacttgaacaacaaggatatttttcaggacaatgactatcagctgaacaggatggtggtgaatcatttgaattatcatcatctgctaatgcaattgaaaataatgatattaagatagttaataatgagagattcattttcttaattgtttgtttgattgattgaaaaaagaaaaaagaagaataagaagaagaagaaaaattttactaaattaaagcaaattaaagtaaaagaatattaaaatgaagaaagtagtagaataacagggatatttaaactaaaatgaaaagaggtaggaatatataagatttccatttgtagattaatagaagtgaaaagtttgactgattaattacaattaagatacctaaataagtaaagatattataataattgtaataataataatgaaaaattcaataaaacacgcttgaaacataagacacgataagataaacgcgtcttttacaagagaggataataatagaaaacacgctttcaagtcaaaagtaaataaagcgtgtttaattttttaatgatatgattacataagcaactaagtcacgtgacttgtgacattgctattgttgcgccgcgtctgtgttacgtaatgcgtctttttcacttgtccaatcaaattaatgacattcgcaaccgtaatattattattttttccaacatgattttttgtattaggcttgaatgatatattgaaacttgattagttcataatttttgcattatagtttcctacatttacaaacaacaaagcaatgtcttctcttaccttagtcaagaaacaagcagattttattcttaaaactcctcttttaagacaattatgtttaccagctgctaaaattttcacttatttatcaggttatagacaattaggtcttaaattagatgatttattaattgaagaaaatcctgcaatgcaaaaggcaatttcaagattacctgttgaagaatcttatgctagaaattatagaattattacagctcatcaattagctgtttcaagttgatgttttacctgaatcaaaatcaattaaagctcatgaagatactccttatcttactccttatatcttagaagctgaagctgaattagctgaaaaatatgctcttaataattctgttgtttcaaaataatttagtaaatacatacaatagttcaatacttatctatttatctatttatttatgatactttatatttataatttaccctttctatacattatttaaaatttaaaaaatgattcaaatttaatttcatgtcaagtcaaattaagttaagttaagttaagttatttaataaccatattcattatagacaatatcacgttctccttcctccattgggaatccacattcttgtaaaattttagaaattccaatattcataactttatctctaagttctttatttttaacacaaaataatcccataaatccaagtgaattttgccaaatatcttcaaatttagctgatctacgtggaataatcatcatccaatttgacatcattaataaattataacttaatttcttatcttccatatcaaattctttgaaaatattcattattctcttaattaaatacatataaagtattgctaatgaatctctttcatcttcttcctgctcttcattctcatacatatcatattcctttaattttaaaatataatgtttataacttgccttttcataaactattggacgacgattttcaataatttcctttggaataaaataattaactcctctaacaacattactttgatatgtacggaatccatctggtaacatcataaattgaatatgtttatgaaattgtgaatatccactttcactaccactattgaagaatgaaaaatattctttattactaaccttcttcaaattatctaaaattgtatgcattaattgtaattcaattggtttcaataaagtatcctgtttttcaaattctttagtaactaaaagaaaatgatatttagtatttgggaatttatttaagattaatctataatttcctaataatgaatcaataacagttaattcaatttcaggttttaaaaatggatttttttcaataacttcattcaatttgtcttcattaatctcttcatccttattacctggttcacttgctctattatttggtctttttgataatccactcactatcttaatctcattctcaatttcactctctggatcagtaactctttcaaattcaatattttcatcataaattaaatcaccattttctaatgctttatcaaaaacatctttaactatatcgaaaagatttaattctcttaattcttttaatgtgtcaatttttaaacccatgtttgttgtgggaagaaatgtgaaagaaaaataaaagaacacgtagtaaatgatcgattcaaaagagtcgtatttatataaccgatgatgacatgtatttttcatcggaccacactaagtggaacgaattttctccattttctattatttaaaaattatcaagtcattaattatatcgatttttaatacatttttattcaattatacaaagctaaagctgatattcttttaataatctattatctagatctttattcatcatcacatgaatatgtaaatcctctaaacatttcttgcatttttggtgataaaacactgttaacaggtgttaattttgcagcttgtgatgtaaactcttcttcaaaacatcttgcatctcttggatctcccatatctggacaatatggaggtttaacacgtaaattaaatacatcatcccaattaatatctccaaaatatgaatgttccataatttcttctgcatctctttcacttgctccaagtctttgctttggatctcttgttaataacttttgaattatatcaactgcctcttttgacatactaattggatataatggttcatctgtcaaaattgcattgaaaacttcttcctcatcgtcacccttaaatggtgttttcgtaagtatcatttgatataataaaacaccaaatgcccaccagtcaacagctttatcataaatttgctctcctgatataatttcaggtgccattaattctggtgtaccacaaaatgttctagtcgtattcccataccacatattctccttacataaaccataatctgctagtttaatatgtccactagttgttaacatgatattatcaagttttaaatcacgataaattataccattttcatgtaaaaatttcaatgctaataaaatttctgatgcataaaattgtgctctctttaatgaaaacttcttctgttgaacatgccacattaaatcaccaccactgatatactccataacaaaataaattctattttcagtttgaaatgattgatataaattcagtaaaaatggatgtttatgtttattagcaacaaggaaaactcgtttttcagattttgtactttcaatttcatcattttcaacaatgaaatttttctttaaaactttaattgcacataatctctggtcacttacatattctgcaagcataaccttgccaaaattacccttacctaagactgaaagaaacttataatcatccagaccatatctacgacgatgacgacgtttttgattatgatggtggcggctttgtcgtggttgagaacgttgttgtgcgtgatgtggatgaacaacactatttggttgaattgattcattgtatgataaatcgaactggtgcactcttggaaccttcctttggatattttggaattctgcttccatcgtttatatcagtataagtcttgtttcaaatctttatcatttgtctcttctaaactttttcttgttatagcaattgatggataattatcttcaacagttttggtaactttagtttgatcattaactttgttattttccggtctacgaacatgtttgtcttcaatctgatcatctgttgctggtaatactttgtcatgatagttcatgtgattattatcatttaagttataagtgaaagttttttctaataaattcttttcttctttctctgaactgattaaagttgttgattctgattttctttcagaaggtggaattgatttaacatcatttatcactttagatggtgaagttagctttttcttattagctttttgttgattaattctcaaagtttccaaaatcatttcaatagtctttggtgacataccacataaatcaggtacataatgaacacagttagcatgacacataataccacattcgtcacatttacgtacatttttctttccaaaaggtaatatataaccacaatgacaacaccatttagcaccacgattagtgacaggattaaacctatgtgggaatcttatgatttaacttagtatcatcaatacttgattcagaattagatttagaaatgcattttgcaattatatttttgatacatttttgatgacataaaaacaaacaatcttcacattgaaatcctgtatatctcaaaaattcattacatacagcacatgacataatattgtaaaattgtttttgaacaagtttatgaccttgagattcaatgacatcttctttacgttgacgaatagcaccatgtctacccaaaccactagtaaaattattgtgatcaattctagttttactatcattagttttaacaaatcctaaagtaagaaagatttcaccagatggttctaaaccgaaccaaccagtagatcgaacaggaagattatttgacacagtggaataattggaggattctgaagttgctagtcaatgatctatcagataattctggaacagatgtcaataaatttgattttgaacttgtatgcaaatgatttgaaattgggctactttccttaacttttgatggatctatccaattttcagatgtaattctttcttgattaaccttttttctacgtatttcttctgcaatgtccgataatgataaccagaataaaccaactggtaccaattgatcattaactttatcataaatggtaagtgataattcatttgctttatcaaccttaatatcaaaaaaatcggcccatctatcatttcttgaacctttagtttttgctctctcattgtcatctattttaatacttataacacattctggatttctagaaaataaaggtgattggatatgatcaacatttttcacagcttgaatttgaataaataaaacaccggataatggattttttcttacagtattaatcattgagttttcacgtgcgatatcatcaaaatctatgtacattgattgatattcttttaaagctcttttcatcaattgtaactttctgtcactttcagatttaccccgttcagccatagcaatacttgatctatcaccttctgcttgataaagactatacattttttcatttgcttgtttatactgggattcaacctgaattttaaactctaaaagttgcatcatatattgaattttgtgacctaatgatggacaatcatactttactaaatccagagctgtaaagaggggcctttgtctaacttgattataagactttggattagatttatttggtgatgatagttcactactggcattttgttgctcacttaattgtaatttacttagaattgattctaaatattcaatgttaacttgagcttctctaacttgtgtattacatttttgaataactgctggattgtcagttttcttcctcaaatgggatgccccctctgctaatttcttctccctatcaatttttttcaaaatatcagatattttatccttaattgaagctggattggaagacattgtgctttatattgtagtttggagtaatattattgactattattacagtactttgtattctaaaataaaagaaatgacggcttaagtttctcaatgacttagttttgttatatcgtacccgttagaaaaaggggaaatgtgtttgtttgagtttttaaataatcagatgtgttccctgtacaaaataaaatctagcaatattccaataaaacaatccttgggtatattatattactatctatgtgtacactgtataaatatgagtgaaggatacttatccggaaacaattgaaagctatacaataaagagaaagtgaacgaacgccttaattaaacaagtaacaaacactccattcctcccaaattgtcaacaaaaattttgtttcgctcagtttcacatcattgatctgatatttcattatcattaatcatgctatacttcactgagtttctatatttagttttaagctttattattcatatttttatacagtatttactacatatattacttaacgattgttacatttacaatcacagtctggaactggacagacgtaaatgtttggaaaaccactcctctgcatgtcctgcatgcatacaatgattacatgacagacaaaaactaaaccattccttaaattgagattcgttatccgtattgtctccactctttaaagtagcatctatatctgcatggctattcgtattatgtcttctatttgtatcaatagtaacatctggtcccgtagcttcctcatctccgaaatgattcatgtgcataacctcttttggaactggaacaccttgcgtaattaaacaaatagcacatctaggtaatgggtatccacaattattacaggatgtcttggtgtttcttttccttgattttaaagctcctaccagtggttcatttatgattgatttattacaattgatacattgtagaaacagttgtcttggaactggtggaatagcactttgttcattaatttttttagataatttatttcttgcaatatcaaatttagctctcactgagaataaactccaactgtttaataatgatctgtaatcatcaacccatgattctactctatcatcggtgaagtatttcgggcacgcaaatgatgaaattaaacaagcactttgaatatcttgtgttctatcgacaaatgattgtaataaattaacacctttcatggtaatacctgtcaatattataccttccacattacctctttcaataacagtatctgctactctattcaaatagatatctaagtctgaatctggtagaaatcttaatgcaacacctaatctttctctcaatggtaatgcactttcatctaagacgtcccaccaatttccatctgcaatataggcaaatatggttcttaagtatggatctgctaattctgatgctaattgtctacatctatccttccatgtattatttgtggtagagtcagtgaatgctgaatatgctgcaatggcagtcgacatgattttgtagttttcattatttgactcacccaatatattaattgctctgttaatatcaccgtgaaaatggcccacccagcagccctttcgtagttaccacctgatataagtccgttaagtttatcttctaattcacgagctccaaaatcccatccaataacatacattgccaactttctttcaatttcctttgagcttttaccattaaatccaattacaggtttggctaataaaccatactccttggctcttctctcaactatacatttagctgcatatgtaacatcgttttctgtcacattttcaaatcctgtatatctattgaaaaccatataatctttgttcatattccagatacctagaactcccaaatatccaaaatcaaaattattatagtgcattttgccagcacttatcaaattatatgatatatcaatccatttccaagcattctttaaatgtaaatgggtctcatacgtttcaatcgagtcgagaatctccatatctttctttgcatctacaccatatccttttgtagctctatttctcattgtagaacatatatcgttttctaacagtttatccgatactacacacattgtatccgcttcacctatataaacatcaatttcattgtcatcttgaatttgcatactggaatttttctggagaccacttttattgtttatttcattcaaattttcaggttctaatttgttgccaatttgattagtttaaggataaatcttgaagcttttcaacaaattctgtgtttttattgatatcaaaaactctttcattgatagcatctttcacatatttactacaaactccgtcagttccactaaatgttaagtcattgtatgagttgaatacaatactatttttgactatcagtaaccttcattttgtaaatactaccggattgtctcatacaaacaagatcaattccataaatagatgtcttcgacggtgcataatcatatgagataaccctttcatatttagtcttcgtatcgtgaactttggagacaaacattgagcctgttggtttaggaagtttggaaataaacattggattctcctttttattttgttttaccattgaattatattgtatgatttcttcattcaaaagcaggaacctggcctatacgccatcttctaactaaatcaccatcaaaaagtgcactgatttcaccttgttgaacggaagagaatctgtatggtgagccatttgatcttctttggtaatcgtttaataatttattgaatgaataaaacaggtgcttcattcaagaccgctgtactttgattcatatttgttattctaaatgattctgttaacttcctacgatcccaaatcgctaatgaaccgtcttcactgttagatgcgaacataaatggtgtgaatgggttaactgtaatatttaaagtacatctagttgcaatttgataaattggttgattacttctcacatcgtattctcttaagcaacttataacttccagcaacaaagtttttaggttccgttggacaaaatgaaagtgatgaaatactttcattatttatacaactaaaaattttattagttttacctctaaaatcaccattttgtaaacaattcatatcccaaacatggattgaatgatcttgacgtcctctatcgtatcccattgcaattaaaccattttcattgaatgaaatggagttacatgaacgtgattgaagtggtttcaaaactaccgattgtgtagatggatttctaatatcaaataatatacatttaccatcaagttgacctatacctgtcaatcctggagttgcagctgagtagttgatgtattgaatgttctctagttcagtcttctcacttattttaactatattgttgtcctcgttgtccgtagtgctatcagtttgataaagagacaccacttctccgatgggactaacagctagatattgttcttcatcatttatgcaccatccttgggcacgtgtcactgagcctgacatatatgatcttatttagttaagctttgctacggaagaaccctgtgaaagaatcgaaccaaaagtaactgacttgcatcaatatagtccaaatttttatgtgtacttcattttttcaattttctaagaatatattcaaaaaaattggactattacctttagccttttatttcttgcagatttatataaacatgagtagctcaacgctagaacacagatctgacatattgagattgcatatattctaattttattttttatataataatatttatatgttacaaattttgatgtaaaaatgtcctaaaattcagttaaccttaaatttgagttgttcacgttgtaaatgttgagctttaatttcagaactaccactagtccaattatccaattcatcaaaaagtacaccccattcacattcacccttttccataaatactattcctaaatcatactccctgctttccccctcaattaatggggtttccacgctaaactgtaaaactccatttatcaaaactttcttttcatatgtatatggaggatccttgcaaactggtatatgtctgagcataccaaatattggagctttatttctatttgttaattgaattctaattgtgtaaaattcattcaaacttacattattcagttcaacttcactatcattggtatctaacaattttagagacaatccaatcttctcaacctccaaaacttccaccattttggaagaaaatttaaatcctcttaaatcaatatcaccatacttacccttgtggatagagtttgaagaatttggtaatatcttccatgatgccttgacccttttcaaaatttcttctttataccaaaatgcgtgtttgataaacagttgttcagccattggtgttttcttatcaacaataaactgtttatttctcagactaggaattgttctaccaagatactcttcatcaaaatccatccttaccaaaggcaaaaacattctcagattttttctactctgtaaagttgtcttgatctgcaaaggttcttcttttatcatcacatctcctgtttgttttgcatcactagcacctggcatataattcaaggtaatttccatctcatcagaccacatattaataaaatctaatgctaataaacaaaagtttgaaagttgatgattgttctctttcattttactaagataagcccaacatgggtctatcattaactcatttatcttagtatttgatgtcaaaggtatgatgtcacagccggccaattcaacactaggataaacagttaaattcactggaatagatatatttctatgaattcagttgacgaatcttgttggtgtgaatactctaaaaccaagcttgcctcattgacgccaattttaccaataatttcaacatccagatcaaaaagctcaaaaccatcaatttttactaagtcacctttattcaaaattttaaaaggtttcctctttaaaagctgatactcaatttcataaatttcattaggttgaagcaatttgttatttagttctgcattgagtaattcagttgtagaatctttgaacatagaaaccaaataattaatctcagtctttgatgtatttttcatagtgactttaaattgttttctttcaccatcaagaagcatcaaccacttatcttccaatttcacatctagaattttcaaaaatggttggctattaaccacatcaatactccaagataaattttttgaatcgtaaaacttttcatatcttttattaatcttgggaacaaatgacattatttcatgatctttaagaacaaacttttgtaatttacaaccacatacagaagcataaataccatccacaatcaatgttccattgttttcagggactataataaaaggtatttccaattgagaatatggtctcacagatatagttggtgaaatggttgagttgtcaatctctttcttatctttggtgtaaagtttcaacttaaaattactctctaatgaaagtttaaagtgtttaatatcaatatgaaacataaatggattacgaacagttattttgatcatactttcttctccttcaacaagtttttctggtttctgtatcaaagtgaaagtcaacaagtaagtttggatcccaatattcaattgattctgatctgaatttcaaaaaagcagtcatagtttcaaatgtttcaatttgttcgtttggagtgaataaagaattgaagtgtcttaatgataatgatccaaacttcagatatccttgatgaaagtttacaattctgcaaaatgacaaaatttgaagcaagatttttttctgtgttttattaggatacagaactccgataacttcatctgtaactattccataactttcacagtaattttcaagtaaatacgttaagttttgtctatctgtgttattaacagaagtaatactgttattattaatgactatatcaataaagctgcttatcatcaaacatttcttcatattcattttggtcttggaaaaaaggaatgataaggagtaaaacagtttcatctgttgggtttgtgaaagttgattaaaatcaacatctagtatatggaaacataatttattgaagtgatctgtatcaaaatctttagtaactgtattattgttaaatttagctggtgaatataatatatcattaataagttcaagattgagagagccattgatattaatcaaaaccattaaagtagcatatcttagcaagctttcggtaaccactatatgtggaacataatctatatcatattcttttgcttggtgataatatttagaagctaatataccacattcaaaaatctttttttccactacatccagcggaacaacatctagtttttgggtgtaagtttcatctctcagtgaatttaatgtactcaagacattatttatttgaagagatgatcttggtgacactataggagttgataaaagatttactgaattttttgctgaatctagtatttgtgttaaaaattgaggtaattggaaaggagctgcaattgaagccaaaagaaagatacaaacagctaatccgtcaaaagctgaagctaaccataaatagtcgtttgcatacttcaagctaaaaattgcttcacagaagtcagataatgcacttttcaaattaccggccatgagatagaaattagccatcaactttaattttcttccacgggaactcatctgtttcactttttctgaattcaagtcaaatgacaccgaaactcgattcttagtctttttagtagttccactcaaattaccaggtgatcttaaagttgtatgttcataggcagaagcataagtggaaaaagttactcaaaaatctagatgttaaatcacatattttagtttccaaattttgtgtttttttatcaactgtataaacttctcgtatgtcaattttataatcattgggacaatcaaatataagaacaaattgagttataggagatgggtattttctcttcaattccgcttttgcttcttgtatagtagtttcattcatattttcattccattttgttattccaataaccacagcagtttttctaaatggttcaaagttgtgtaagaataaagattcggtatcatcatctttagtaacaaaattataatatatatgaccctgtgggtaggcttgtggattaaatttccctggattgttgattagatcaacagctcgtacatctttcactcttctcaatgtctccaacacattttcaaaatctgacttgccaatttcacttattggaacaaccagtgatcgcacatatgctggattgcaaaagttgatgatgtccatatgtgtagtacaacaattagtgaatcaagaggtaaaagaatcgatataccagcaacactggtggaccttttcaacataaggtttatccatgagatttcagaagaaagcgtgtttgtcaaaatcagaagtcgaaataaatactcataaacaaaagtttccgctaggccaaacaaaatttaaaagggcaaaaaatgtagcactgctttttcgttcacatatttttgtgtcacgtgacctaaaaattttgaaaatataatgtaatttgcaattttttacagaagtataaattttttcaaaaaaatttatcaactagaaaataaaaatttttacaactgagacaaattatgatcattgtgatgaaggtaataaaagaagaaaaggaaagggttatttaacacattttctatttaatatttgatactaagagctaatgaattacatatataagtgttcaatatcttggtttatcaccataaattgaatcacaacaggataactatcaaaatacaaactttaaaaacaaatattgcatatcaaaatcaatagtatcaatatcaacggtctgttcgatccccagttcaggaatgttttcacgaaaaattcacttagcgagggataatttattttcacagttagtgatgaaaatccaatgatttggaaataatatatggcttctacagaggctgtttctatatagaattacaactatcaacgtttaacctcatcttaaattaaatatcatacaaaaacggaccactatagcaatcttcttagtttaattatcagcgtttagaaatgtcacagagtttcattacaggagaagacgtgcatttcgagtataacaaagaggagtattccaaaaaaaagtacaggcaaaagtactagaaataacaacaatacaaaccaatcatacttaaaccatcgtgatatgacagttgaggtcgaattaaacgatttagatactgattatccagtttcacgtgtcattaaacaagaaccaaatggcgatgtgattgttcaagaaattgctgaaggagtatccatacagaaaaaattaccctccaattcagccaaatcatcataatcaatgttgtgatgatcattgtaatcacaattatcacgatcaagatgaatatgatgaagattatgaatatgatgaagatgaggaagaagaagacgagggtgaagaaggagaagatgagtacgatgatgattatgaagggcatcattgttcttgtgaccccaatgatccagactttttcaaaaatcatggtcctatttacaaaaagaaaccagctaatacagtaccaccttcttcattgttggaaaaacaaaaattaattatacagtgaacaaattcaaacacctattttaggaaattttctttgggattttgaataccctgaagatattccagatatggtccagttctggattaggcttaccttatgaaagaaaaagacaaatttcagatatttcattttctgaagtcattagtctggtgtacaatgatccaaaatctagatgttcttgcaaactttgttcaataggaaaatcattagtggaaagagaattagaaaaactttacaatggttactataacgtgagaagattagctgtaaaatctttagatgaagttgatttgaatataaatacaatgaatgctattttaggaatagtagaacaagaaaaaattttacaatcagaggatgaagaagaagaagaagacgaagaagaagtagaagggaaggagaagaagaggaagaaagcgatgatgatagagatcagcgaaaatcaaacatatctgaacagaaatatgtaaacagcttattatccgttgcagatgatattgtcaaaaataatggtaaaaattttattaatctgatcgagcaactggatgataatttacttcaacgaatagatgaaaaaaccggaaaattagaaagaaatgttgaactgttagtaagagggcaacacaaaatcagagaagttgaagatggaaaagaagaagaagaagaagaagaagaatattatgaagaagaaggtgaagaggcagatatgctgaattacgtagaagaagaagacgttgaagaagacgaagaagaagacgttgaagaagacgaagaagaagaagaagaagaagatgatgatgacgaggaagatgacgattcaaactgcagtgaagatagagtgaatgattatacatcccgtaagagacttcaagagacgtataagatgttacaaatttgttcctcaaaaattttgagaagaagactctatgatgcttttcaagctagacgagcagaagaaatttccaaaactttactagctgaagaagagaaagaagccaaattaaagagagagaaggaagagaaagaaaaactgaagaaagaaaaattgaaggaaaagaaaagattacagaaacaagctaaggaagaagaaaggttacgtcttgaaaaagagaagcaagagaaggaattgttagaaaagcaagaacaattacgtaaaactgaagaaggtagaaaacgtaaagaaaatgagaggaagaaacatgaagaggaagctaaacgtaaattggaggagaaaagaaagagaaaagaagctgaattagaacgtcaaaggaaagagaaggaagaaaaggataaggctaaattagaactgagacttaaaagggaagaagaaatgagaatcaaacgtgaagaaaaagaaagaaaagagaaggaaaaaattgctaaaaagaagaaacaaaaagaagaagaacttaaattgaaacaagaacaacaaaagaagttagaacaagctgaattgaacaaagctaaggtagctacaccaattttattgaaaaaagatagtaatttgaagggtaaaactttaagcacaactgaattatctgatatttctactgataacaaagtttcaacccctatttcagtttctcaaatttctgatggtcgtagaattaatactggaactccttctcaactaattcatccacaattatctatgaacaatgatactttttttcaataataacaacaataatttatccaatagtaatactgatttaagtcaagttcttttaaatccaacaatatatgaatcaagaagcgctagtgcaagtggtattaatccaaatatgaacttaacccctcaagacttaactacttcctcattatggggcggtgaattaaataataatatcaatccagggactgttccaaaagatcatcgtcaaggatccatatggtcatcagctagtcaaaatctaaatccagtaactatgaataatccatggaatagttttagtaatgcttcagcaagtttccctgaaactggaaaaggatcagttataaatgaagacaatgttaaaaatgagttgttcaaggcatttgctaatgttacccctaccactaaaaacacttacacattattatcattatatcaacatattatttcatctcaaacaaatatgaaccatggattatcattaacagatttcctacaaactttagtatctggcgatggttatgaaaaagtttattctattcttgcaggcgaagatgattctattactgttagattatttgatggatttacaattagtggacataatgttaataacacctatttgagcccacataagaatacacaaagtgtcagtttgaataataacaatttctcatcagccaacagtaatgtgaacaatccggctgttacatccacaacagagaataacggttttaataatatttctaataacttgaattttggttttgataatttaaatagtcctctgttgggtaatctgaacagtgtgaacaatttgaattcaatgggtatgaatggaatgaatggtatgaataatcttaatatgggtcttggtaattataacataaataatccgaataacatgaataatattaatagttttaataatatgggaatgaataatatgggtaatataagcaatatgaacaacatgactaacatgaataatttaaactctttgaataacatgggcatggacatgaatatggatatgaacttaatgtctatgaatatgaatggaagaatgaatttaggtaatagtttgaatccattaaatgattctatttcatctgttggtatagatccattaaaatacggtatgaataatagtattggtggtattgatgctaatagtttgagtattgataatttatccggtgtgcctatgaatattaataatccgcctggtgtcaatatgaacatgaacatggacataaataacatgaataatatgaataatatgaataatatgaataatattagtaatttgaccaatacaactaatataaatatgaacatgaataacatgggtaatttgaatactatgaatggtatgagtaatcttggtaatatgggtaatatgggtactacgaataataatattggtggattctcaaataataacttcaatttgaatctgaatagttttactggtatcaataatattatggatccactcaatttaccgaatattggagaaatagagacagatctttctaaaatttcactatctgagaaaagtccattaatctcatcaccaacatctgctctttagagtcaacatcattatataaactcttcagtaactgaagttgtataacaactgtaatgccataatatgtaaccctatatactatttacgtaattccataataacaaaaaagacgcatcgatgagataaataaaatttctatttttatttcactgagagggtgagtaagtcctctcaaagaatgagaatcgtgttgatgcatttaatttattattaaatttatcactttaagggtagttaatcagtgtttgtatccaagttctttgttttatatatctattcccccaagcactaagcatttgacttctttccctttaacaaaagaagctcttcattgtattgctattcacagtgtctcactcagaataaaagcatttattgtctttaatataccataatataccccacgaacaatcgtcattgatcactgaagagaatttcgtatacatttgaatagaaaagatccacagtcattttacacaatttactgattgttatacattatattccaaaacaaaaaacaattttttaaattatatcataatctaactgaaattataattataattataatcaaaatcaaaaataaaattaaaaataaaaataaaaattcatcaaatcaatgagtacaggacctaacaacgagaacgttataaaaagaaaaatagttattgttggtgatggtgcatgtgggaaaacatctctactttatgttttcaccttgggtgaatttccaactgaataccatccaacagtttttgaaaattatgcaacagattgtcgtgtggacggcaagcccgtaagattaacattatgggatacagctggccaagaagaatatgaaaggttaagacctctgtcttattcaaaggccaatataatcctaatcggattttcattaaatgcacctgattcattagaaaatgctgctgtaaaatgggctcacgaagttagacaatattgtcctaactgcaccagttatattggttggtttgaaaaaagatttaagaccaatagatgatggttcagatcctaattattcaactaaatatgttaaaccatcggatggtgaacgtgttgcacattatattggtgctaaaaaatatattgaatgttcatctcttacaggtgaagcagtagatgatgtctttgaaattgcaacaagggctagtcttattgcaagacccatggaaagaaactcatctggttgttgtacaatcgcttgaaactataatcatataatcaaaaacaaacacccaattttgaaaaaagttagttattcaatattctgacgatttattaatgttcatgtctcatagattattgatagttcaattgaaaatcatgaacatatcaaaacaaaccctaaaggtatttccactccttgaatgcataaaatactatcagcttgatgaataactataatgacatcattcattatttgattataatcagcacaatttaatataccttacttacattcttttgctttactacatatatttataattgtattatagttcatttttcttatctaactttgattgtttttattttcctttatagttctgatctaaaaaaattgttaaatgatacatattaatatttatttcacaaatcactcctataatttaggacaaatcatcaaaaaaacggtcttaacgcatttatttttttcaccttgatctaaaaaaaattagattcaaagtaaactttattaaaaattattgatctttctttatttgaaacgatactctctggcccccgaagtcatcaatatatgaacaattgcagaatagttcagaaaagactcttttcattcatgctcgatttatagacaaactgaatttaaaacatcaacggtttatgcactttcaacagcacccgctaaatctgctattggagtaatacgtatcacctggaccatcgtcattaagtatttttgagaaattaacactatctaagaaccctgcctaaacatagaatagcaacacttagaaaactttatgatataaccgacgaatagattaccagatggaactgtagagtctaaaaaactattagttggatgaatgtttagtactattttttcaaaacccaaaatcttataccggtgaagatttattagaattacatctacatggaggaactgcaataattaataaagttatgcaaacaattgctaaatttcacacaccaagttccccaattagattagcagaacctggtgaattttcccaacgtggatttcagaatcaaagattcgatcttacagaagttgaaggtataaacaccttaattcatgccgaaacagaacttcagcgtgttagtgcacttgcgtcaatgaaaggtgaaacaaatgtcttgtttaatgaatggagagaaagaatattgaaagatattgcattattgacaacagtcattgattttggtgaagaccatgatatagaagaaattaacgatttattcggtaatgttgagaaagatgtagtacagttgaaaaatgaagttgaagaatatcttagaaaacttcaatattcacaggttttattagatggaattaagttgacattagttggaccaccaaatgctggtaaaagtagtttactgaatatccttgcacaagaagataaggcaattgttagtaatattccggcacaacctagagactcctatggatgtgccattagatataaatggattcaaagttgttgttggtgatactgcaggtataagagaaagtgatgatataattgaaaaggaaggtatcaaaagagcaaagaaaaaatcgcttaatgctcatatgaacgtgcttttatactcagctgatgagatggagataaattcagattttctattacacgctaaagcattaatcaccaatgacgagaaacaatttttagtgataattaataaggcggatttagttgatcatgaagctaaaaagaatttatcaaataaaatttcccaaagcttaggcataagtgaagaaaatgtcaggtttataagttgcaaaacaaaccaagggattgaagatttagtgaatgatttgacgagaagattcaaaacgataacaaatataacagataaggatccaattacaatatccactcgtgcaaaggatattttaattaatgatgttctttttggttttgaagaatttctacattttaaggaagaagatgatataaccttggcttctgaagctttaagatccagtgttgaaggaattggtaaaataacaggagatgctataggagtagaagaaatcttgggtgtcgttttttcaaagttttgtataggtaaataaacaaaggaatatacacatccctgtatataatgtaggggaaacccttatatttaaattataaaccagaattacgattatgaacactataacttctgtttttgtatatagcaggtattgtaaatgtattaaaattaggcattagttgattctgtaacatttcatcatcaattgactctgtatatttttcttcttgaccagaattttcagaatcaatatcaaatgtagagatatctatatgaaaacacccatgttcatttttgccaactgtgaactttctcggactaattgccacagatagtttttcttgaaaaggatttgtaaagtataggaaataaaaaaatattccaaataataaacctatcatgctgcctaatatcacatctaaaactttatgtctgttatctgaaactcttgaaaaagctattttcatagcagttattgcagggtagataattgaaatcaccaacttccatgtaaaatattttctgcatgtaaattgaacttttccaaacaaaaataaagctagaaatgtttgtgacgcatatattgtagaggaatgaccacttggaaagcttctaaaaccctcattaagaaggggtatattgggttgcagacaataattcctagttatcattgaatcaatctgtgatacattacttaaatcagggatacaacgattcaaaagatcaggtcttggaattccagctatatttttaataatgacgacaagaagtaattgtgaagatattgctccaaaagaacctaaaactgcggaatgaatatcccaaagtaatcttttcttatttctatccctgagaaaccataaacaactaactacaatcattattaaaggaattagtactatcataatgagaaggtaccaaactggtgcatatgttttattttctggtacataacgatgcataatggaaatatccgcataactgaaatctgtctctcttggagttttagttgctccccacatcaaggcaaataataggattagtaaataaactatccaatctacaaaatatgacacggcagaaaacagggaaacactacagtctccaaaaatgtatgttttatctgctatccacattattactctactctctgatatctagcacataaaagaaagaatatattacctaaataggtaactctccctcattgctggataagttcaattcatgttgaactttttatttaagaataagtattagcctcgcgacatggaaaatgtgacacaaaattctgccaatcaaaaacgcggccaattttactttttagtgaggggagaaataccaacatgtaaagtggttaagtaagaaagagtttgatcaatttgattgaatcgttttcaaattgatatcatataggacaagaaatcagcaatgttattagcttggtcagtatttggtatgttatctattttagaagtgcatattcacttcttgaaactgtcatttttttcataattttttacttataagacaagtatactaacattcatggtcaaatataattcttgacgaaaacttttaattaatacaggtgttggtgtcagagctttacaaatgggtattagacaagccccattactccacgctccaatgggttttgtttactcagcagcgttcactaccggaattggttatttctttgaacaatgggttgaaaagaatgatgaacttttagaattaagattaaacaaacttagaaaactcagagaagcatcagcttaaacataccagacaataaaaaattccattttattcatttattagtttcattttgtatatttttttcataatttaataaaaattcaaatattatgtccaaattttataaatatggaaggcatatactagatattatagtcaaaactagaaacagcactagcagacaggataacattaattaactataaaaattagactttgaaatgagcaaaacactttaataagaatgtatttaaaaaagtgtcaactgaaagctaaagatatccagctttttgtagttcgttgatgtcaatgtccaaatctttttgtaaatcttgaagttcttgttgtagattatcatcaaacgaaccaaaatcgtccatgttagaatacaatcctggtgtaattgtgcttactgtacttgagacttgttcatttataccttgatactcatcatcatcatcatcttcgtcatcatcttcgccattgtaatcttcgttatcatcctcatcatcatcatcttcatcaccatgttcttcattttcaggttcacttacatcactatgatcatcatcactatcaccgatttgatagttatcatcatcatcatcatcatcatcgtcatcatcatcattcgtagctactatttgattaccacctggaactaatttggcagcctctgcaagatcaccaggtgcatcagtattatttttaagttgcttttgagctttatgttcatccgccattgaattatctctaaattctttacccttaacatatttatcaattttttcaaattctttttggtcaatcatactaaattcatattgttcaacaacaccataaattttaacatcaagtaaaacattgaatgttagcctagtaattgaattataagtaatactttcaatatcttgagatttgaaaataagtatgggttttttaaatccaaatacaacatggttaggtaaaaagtataaatatccttcctttgttcccttataagaccccacaaaaaatgtttcatcagtctgtgtataatctgtaattttgaaatttactaacataagttgagtagttaaatattggacaaaagatttaccccctaaaattgaaccaaattgttcttcaagttgatcattgttaaattgaattaaaaggggatcatttttaaacatattaccatcattttctttatagcttaccaaaagatatctcaatggtttcttttcaggaacatttaatatagctgcaaatattatattatcatcagttaatgttcttattataaattcaggtgtggtatctaaagattttgataatgctaaataagcccttttttcatttttaacagctccaaatactaaattcagcctttttctgaaaggtgattgaattgataattcaggtaattgaagcataatattagtatcctgtaatttttcaattgatacaccagtatttacatttgaattaatacctaaatttggcggcacgatgtcaacactaccaaaactaactcttttacgctttaatgaaccgttatttcctggtttaccgttttgaagataatcaatcaattctttgaaaactgtttcacttgtaggacattgttcaatgacattattaatacctttctgtaaagactctgggaattctttcaaatctaatgatcctttcattgttaaagcaagtaatgagagactatgaactatgaaccttatataatagcatctatccacacatgtgtgttttcaagttcaagaaattaataaaggtggacacctaaaaaaaagttttaaatgtggtatctttaagaaaaagacgcgtactatcaataattactgggaccattggcagaatgaataagttgaattatccgtttcacgtcccactcgttctttttgattgttgatgtgtatctatatttgaatcgggtttaaattgaattatgtcactaacgatcaagactaactaacatcaagaaaagggatgatgcttcctgtttggaataatgaagagtcgaatgattatcagcccgtctctccaaggcaagctttacgtgtggctataaatattaagaagttaattgatacaattgtaccattacctgtttctgaagataaacttaaaaattttcagctgaatttacctcaaaaggaagtcttggatgcagtttatggagctgcagggggtgaaaatgctattgatggcagaaacagaatttcatcttcaagaagatatcaagcttgtttgattttttgcttattaaaagtttctggttggtatgatactttagcagatgctgaattggcaaataatgaattatatactacaagatctttgtttgctcaaatgattgcatcaactatcattgaaaatgaaaaagatgataagtatcttttcatatcaatgctttgtcatagatactcaatcaacttaaatgatgaagattcagatccggaaaatgctttagagttggcagttgatacccattcaatgatcatatcaactgcaggatatcaaagatgtatcaaatggttatggattggatggattgtgcaatcaaagaatgatccatctgagtatgttctatacaatgataaggccgacacaaactatttttcacatttcaatccagatagaattcaaacccctttatatcaaaatgttttagaaatttgtgttgctcttttatatcttttgatttacactttagttgcaaatatcgatgctgattctgatactttgaatctttttgaaactgctttgtattttttcactttaggttttgctttagatgaatttcaaaaattttatcatttaggtctgagctatctttccttctcaaatgcttttaatgatttgctatatacaattttatttgtttcaattggttttagatttggtggtatatattctaaaataccagatcacgcaagcatgtacaatatcacatcacaaagattcatggcaattgcggctcctttgatgtggatacgtatgtttttcttttgtgatctttataaattctttggtgttattataattgtcattagtacaatgctaaaggaatctttgatattttttttcctgttatcagtgattattgtgggatttttacaagcttttattggtttggatcaagcagatggtaagagtgatttgacatatcttattattactaatatgctaagaacagttttgagcggtcctgatttcaaaagtattgaaaggtttgattatccatatggaagcattctttactatttatacaatttcttagtctcagttatcttgttgaatattttaattgctttgttttcacaagcttattctgatgtagttgctaatggaaatgatgagtatctttatcaatattcaactagggttttgaaatatatcagagcaccagatgaaaaaatattcttacctccatttaacataattgaagtatttatgcttgatgtaccactatattggtggatggataaaaaattattcaatgatatttgcaataaaattttagtggttctttatttcccattgctattatttatttcaaactacgaatctaaacttgctaaaagagttgcatacaatcgttcactacgtttgtcagatgatgcaaatgaagaaaacagagaatggttattatgggatggatttgatgatgatttatctaacgaacataatagagaaattgctgctcaatcaattcaaagacaaagagatgctgaaatgcttgaacctgaattctctaaaaactttaaaacgtggaatgataaagttgctaaacttaaacctcataccgctgatgcacagaataaaggtgtaacccttgagagtttgaaaatcattgaaacagtcaataaattaacagaaaaagttgatattctgataaaacaaaatgaagagctcagaagccaactgaattctacatagtgaatgctctttcaactcaacatctctgttgtaatagctcaaaagctattatcttgaatggtaacaatttcttatctacaacaacccctaattgggaaaacaaacattacgtaatatttttttatagtgattgaataaatttgttgccaatcaattttaataatcttagagacacacctctgtttttgtagatatgaacaatcgtaactttgaatgagtaccgatgatatagaagaatacaaagtattatcttccgtacttgatgctcacaaaaactatggaaactgggcaaatgaacaattaattatatcaaaacaacgtaaatatgaatctttgaataatgaggagaagtctttaatagaatggtttccgaactatttgaatcaactcaaacacagcatagatataaacagtagctattttaccaatattgcagatgtaatgggtagtatatggggtgcacccgaatttgaaacttggcacaaggcctcctctcttgattttgataaaattagaagcattatgattcaatatgtacgtgaatggtcaagtgacggccacactgaacgtgaagtttcatttggaagaattttggattttgcagaaaaagccttccctgttgttacagaaagaccaaacgttgaagtactggttccaggttctggtttaggccgtttagttgtagaatttgttaaaagagggttttcaactcagggtaatgaattgtcatatcatatgctcctcaattcaaattttattctaaacaacacatattgtgccaataattttgtgctatgtccgtttattcataaaaattccaatgttgaaaaaagaaactatcaatgtcgtcaagtttacttccctgattttaacccaggagatatatcacttataaatgaacaatacccagatataccggttgcagatttgatgtcaatgatagctggaggttttgtcgatttatatggaccaccagatagaggtgaaatatcagatacgtacacaaacgatccattagcagtggagtttcgtaaacaaaatgccaataagtttcatataattgccacatgttactttttagatactgcagctaatattattgattatcttaaaaccattaagtattctctaagagaagatggatattggataaattttggcccattactgtggcattttgaagatgatgacaatgaatacacaactaaaacaccagatcaatcaagaccgcaaagagttccttttaaaggcttggaactttcaaaagacgacttaatagaattaatagagaaaatgggatttgaatttgttattcacgaatccaatttaaattctacatatggaggtgacattaaatctttaggatcttggaactataaatgtgaatattgggtttgtcgtaagaaaatattgtagttgataaaaaaatttatatatcaaaattatgtggaagaaaaagcaattgtatttttatttaaatttatagagtttatcatgaagagtgacagggtctctatataaacctgtatgtttttgccattcatgaagttgacttaattcaatttcaattgcagaaactgcggcaacaattttagatgacgttgaaccagatgttgagaaaatcaaagatgttgaaagtttagccatagcagaagcaattaatgtgattgatttacccttttctctgtagtatttgtataagtttttacataatgatacttgagaattaccagatttttccattatatcttctaaatgttcttgtttaataggtaatcccattgaagaaagaaaaacaaatatttgcataccttgataatttttttcgattttttccttcgaacaagttgaatttataaatacagcaactttacttcttagtttggatgttggtaatatcttagacttgataaaagattgaatagtaccaaccttaagagatttaacagcatttaaatcaattatatcttcaccttgcaaattacttgagaataaataagttttattttcaatttgttgccagtaactattatgttgtttcatacttttaacatcaccagcagatccacctaatataccgaaaagagcatttgaaaagtgattagaattgacagtatttgcagcagattcagcagctaaaaacttctcaatcatggtatcaagttgtgattgtttcattttattgatagattgctcataccattcattcactatatcatctaatttaccatctaattcttcagcagtatgacttccactaacaactgaaatatggataccttgagtttttctcatgtttttcaagccaacaaagacaatataacctaattgatattcagttctaatctttgcagttaatgctgctcccataatgaatgataaaaatttagttattgatctatcaaccatattatctcttaaacaagtttgaatgaaataatcaattgcatttgttttatccttagttgttgatttggcaaagtagttagatccagttggtaatacaacagatgatgggaaagaatgattttcaccttcaaatttatcaactaattttgctactatcggtaatacatcatttttcagaaccaatccatcaacttcaccttctaaaagagcagataaataacatgaagaaaacaaattaggtacaatggatgagatatcagaaaacgttaaactttcaagtgcttcaattctttcttcaactaaccatgtatcttcttcaataattagccatcatacctaatgtaactgattcaatacttggcatacttaatgcatttttaaatctcaataaaacagcatttttggctaagtcaaattcttcaggagtaattgaacttttgaaattagatgcaactaatttgatttcataaacgataattgctaaaactttagtaaaattttcacgaggacctgaaacgtttaataaaataccactatcaccctttaacgaaggacaaacatcatatgagtaatgcataatcattgctggatataagtattctttgactctatgtttaacaagttgaatcaaaacctctaaagttgcaacattaattggactttcaccaattttagtattaattaactccattgaaaaaaatgctttgttggcaaacatatcattaacttcagttttaacccataattgacaaccagcatcactgtgatataattttggaacatccataattgataaatttttaacggaaaatcctagggaggcatcagctgaattttcagcagtttgtttcaccatttgaagaagttttgtttgatcttgtataatttcatcagcaaattcatttggtggagaaaggtttaattcatatgatttagaatttgataaatcgtttatatttgatttgatattgaatattttataattgaaatcaaaatctttttcataagcacttgtgaatgaatcaacatctaaccaatctaaattagtttttgaaatattaccaacatatgataccaacaaattatcaactttgaagttatttttaacaaattcacaaaattgcacagcttctgaaatccaaaattgtttagctttctcggattcaccataggcaccacagaatccggagactaaatcatcatataaatcatcaccggtaatgaaaaattgaccattctttttaacatcatgcaataaattggtacttaaatttttagcttcaatatttgattgagaaggagtttcagcataaaggaaattatagatcccaataccattaaattgtgacatagatttggcaagatgtttagtaaatttagagaatgattttgaatctttatcattttgaaaaagtgaaatgtaattgaaaataatgttaattattgaataaatatttccaatacctttttcagttaatgccatttcaatttcaataatactattatcataggtaacagttgcagtttttgtcataatatctgaaattaaatctcttttaaataaagcagatgaaacagtatttgttgaatccgatccaaatatttcacaccaataattaataaaaaagcttagttgtctattatttgaagaatttgtatttttcaaagaaatggggaaaccgacccttagaactgaatctaaatctttatcaattaaaacagctctcattaaacaatctttagtatatgctgggacactatatttatctttccaatatgattcagtaatgttaatatttaatgaatttgatgaaattttcggttttaaattaattggaatagatttttccataccaattttagaaaaatttgatattgctaatttttgtaaatagttcaatgattgtgggccacgtaatacaaaactcattttctcgggaaggtattcagatttataaaactctaaaagttttaaacgaatatcatattttttacaactttcagtaagggaagtaaaatcaccagttgaaaatcttgaaaattgatgttttttgttagctaataatttataaccttgaaatgataatctattttttcttgatttattaacagtatgttcattatcaacagcaaatatttcacgatttgagaaacttgattcaaatgttggatttgcaaaatttgaaacgaaaatattcaaaatattttcaaaatcagattgagtattctttgatggagtaattgggatactaaaatggaaacttgaaatttcattactagttaaagcatttaaagtaccaccagcatcgtgaactaattttttatataattctggagttgaataatttttagaacttaaagtaatcatatgttcacataaatgagctaaacctggaatttcatttggatttgaatgatgaccagcggcaattgataaacaacaagttgctaaatcttcagttggatcagtaataatcaaaccatgaataccatttgaaagttttaaaacttgataacttctctgtttaaatgaataaggatgagctaatggtaaagaataaatctgaggaacattattagctgtagtcatgattttcaattgatctattgatctattgattgattaattaaagggatattatagtgaaataaatatgaaatagatatgatacatattgaagacattgtgaatgttatatacatactccggtatatctagcatacattacaatacgtgtaacatataccaaagtatcatctattaaactgaagaatatcatcaatagtttcctaaataagccaggtcaatgaattcatgatgaaacttatcttatagaaactgcgaaaattgcgaaacccacgtcaaaattcctcgcaaaattcaaaaatatgaaaaatccgaaaaaagccaccaaatttgcgaaattgagaaatattaggtcattgcaagggattttataatttgtcttagcccggatgcacacttgagacagttttacttaattttattttatttttatttttgtcttatcttaatttatcttaatttaattgtatcttgcttttgagtttatttttaaactggtttaacatattatactccttatattatcaaatatattagataagtaatgtcagcatctaatcaaacttcgattaaattggtacttctaggtgaagccgctgttggtaaatcatcattagtacttagatttgtatcaaatgatttccaagaaaataaggaaccaacaatcggagctgcatttttaactcaaaaatgtactgtaaatgatagaactattaaatttgaaatatgggatactgcaggtcaagaaagatttgcaaatttagctcatttatattatagaaatgctcaagctgctttaggtagtttatgatgttacaaaacctgctagttttataaaggcaagacattggatgaaagaattaaaggaacaatcaactaaaaatattactattgccctaataggaaataaatatgatttaataatggatgaaacttcaggtgaagaaattgatggtgcaaggaaagtttcaattgaagagggcaaactattagccgatgaagaaggtgcagttttctttgaaacttctgcaaagacatcttataatgttaatgaagttttcatgaatattgctgaaactattcttgaaaaaatggataatgcaaaacctgatgaaaatccagttgctcaaactcaaaataataatagaattgatttaacagctccatctcagaataatatcaacgataatggttgtgcttgttaaaatactatattaattttcaattttcagttttgaatttccagttttcttgttttcttttcttatcacctaaatgtttcattataaacgttatatttgaaatccttcgtatctataataataccttcttcctgtgatttaattatcataatcataataatatacgtatatctaattttttaaatttatctctttgtatagttacatgtatatgtgaaatattttattgaaatgctactattatatatatcctgttatctttaacttatttaatactataatattattatacaatataaaaaatcataacttagatttcaaattttcatctaatccaccctgagttgcagctctattaacttgtaacataccagttgcattttctgtatgtttaatatgatcatcaaagaaaacaacagtaacagttaaatcatctctatatcttctacttaatggatatggaatacttactaaaagattaacatcttccttatgacctccattacttaatgcattacgtattaaatgagttgaaacattttcgtcttcaagtatataacctgacatattatctgatcttctatatctttgctttggtttacctgatttatctgatatatcaataacttcaggtaaatttttatcctttgatctttgccatactgaactaaataaatttttatttggtttaatcattttcttattttccatccatttaacaactaatccaacaatttcctcatttgataacatttcatataatccatcacttgccataaccataaaatcatttttagatggattaacttcatgtgttgtaattattggttcagctgtaacatatggtggagttttcaaatttgcaggtgattgacgtccaaaaaattgattataaacctttgcttgcatttcctttgcccatttatatcttgcatcaccaaatgctcttgatggttctaatgaacctaaaacacgtccattacgaacaacatttggttcatttggatgttcacttaacagttttgcaacttcagttggatttgaacctgtttgatcaattgataatgcttcaactgtccatttattattttcatcattaaaagatcctaataatgcacgtgaatcacctgtaactgcaacttttaaaattttactatgggtatcataaaatgacattaatgcacatgaacctgataatgcaggcattaataattctgctgctgcattcttatttggtgaatcaagtaatttttggaacatttttatgaacaatttcatcatctaatttaacaaatccttgtttaattgctttatcaattacttcatttgatggaattaaacgtaaattcttctcactgattttataagcactagttcagttcaccaacaacagaatctattaatttatctcttaaatatgcatgatgtattccaacctgcatgtaccatcgaaaactgaccaaaaatgccaatcagtttcaactttttcattattattatagacatcttgtattggaacttgcataattttttctgctctatcatcttcaattggattattacttggtaattgagaaatatcatatctataaacacccttacctctattaactatataactttcttcatattttttcaatcttttattaacttcctcatctgtgaaaactgggattccttgtttattttgttgttgagatgcaccaccattatttaatgaattagtagttgtagtagttgaaaagaaattttgactgattacactattaccaactttatttgaatctaaagttgggaaagtagttgaagaacctgaactaattgttgaaatacctgcatttgaaccattattagtatctaatctaataccattatgtgacattgcataatatgaagctcctaaaaccaatccggatattaatgcaattctaaattcactacgcatcttgatatatcttggtctaagttgtgaatgtaatgatcttgtgaaatgtgtgctgtttttgcccgatacaattgctttctgtttattcaaaacaacatgcggtactttgattattaacaaataccaccattccctatataatatattatatacaattataccaatagtgaatatatcctaaaagagttaaaacacaatcaaagatatgtcaattattcacctccccaaagataataatgatccaatataactccctcctcaatcatcagatttaatacttactacttacaatttttgaatatcatttgcaaatttccaccttctctaaatttccgagaaaaaaaataaaaaaatttcaagttcattgaacattattgattgaatttttcacttcctgaactcaagcttcttttacttctgtttgattcaaattatataccacttagcaatcaaattatagagttgaaaagatgcctccaaagaagaacactaaaaatcaacagaaagaagctgaaaagaagcttaaagcaaaggctaaggctaaaaatgctgaagatcgtacttttggtttgaagaaataagaataaatcgaagaaagttcaagaatatatcagtcaagttcaaactaatgcaccatctgatttgaaaaaacaacaagaaatggctaaacgtcgtgcagcagaaaagaaagctgctgaagaagctaaaaaggaagcacttaagttacttcaaggttcaattggtgttcaaaaagttccattcggtgtcgatccaaagagtattttatgtgaatttttcaaacttggtacctgtacaagaggtaaaaattgtaaatttagtcatgatttgaatgttgctagaaaatcagctaaaagagatttatatacctgatgaaaaggatgaatctgatgaaaaagcaaatgatacaatggataattgggatgaagaaaaacttcgtaaagttattttatctaagcaaggtaatgcaagaactacaaccgataaagtttgtaaatatttcattcaagctgttgaagatgctaagtatggttggttctgggtttgtccaaatactgatacaaaaaataaaattgaatgtaaatatagacattctcttccacaaggttttgtattgaagacaaaggaacaacgtagacttgaaaaaatggctcttgaaaatcaaccaaagataacacttgaagactttattgaaactgaaagagataagttaccaaagactaatttaactccaattaattcagaaacttttgctaaatggaagaaagaacatagattacaaagattaaacgctaaatcaagtgaaaagaataaacttacaggtcgtgaaatagtgttgaaaagatttgaagataagtttctcagagaagaagaattatctgctgaccatggtacagaaatcgatatgtctcaatttaagagtgctattgatgaaattgttgatgaaaatgaaccaaaggttaaagattacggtgacggtacaggtgcttttgctgaagcaaatagggtagattaaacggtaaaatgaatgtatttaaatatcattttaaagattgctacttcaactccattcattagactcaaaagagtgtggattcttttgctgaagtcaaattgaatctgatcactcatacacaattgagtaatttatgagccaactgtaatatagatgtatccattctttacaaaattaattaacaaagactttaattatcaattttataagaacatttactattttaatcttttagtaataataaaataaacattaaatatataactattacattactttagctcttttattataatatctatacaatccttcttcacagcattaacatcttcccaaaatttgaattgaacaccttcaggaacttcatcaattatacgtcgtacccttgctttccatgcaataaatcttttgtccacaatatcactcttaacttctccatatgtattgttacctatataattagcatcatacttattctccattaaatcatcaaattgtaaatcatcccttggttcgacctttcccttacgtatcttattatttattacattcataacttctactttttcagcctgactgttcaacaattctctccctcttaaagagtcaggtttacgaggcacaattggtggcaactttctattaacctctctagttagattaacagcggatgctatagtacttctagcagcatctaaacttgatctacgtctggaacgtcctatatcttcaggttcagtatttcttaaattatgatacactctatcatcatcagaatcatcggaatcaattcctgttggattctttagaatttcattatatttgtcatcgtcattatttctattatttcttgatcttaacattttattcaattctctcaatgctgccttatcatcaccatttaaacataaagatgtaggaacaactcttagataaattgctaaaatttgattaggataatgtggtattaatgataaataagcctctaaatcctgttcaccagtatctccaactaaaataaattttctatttgggaactcattaaataatgcaacaagtgatgatcttttacgttctgcacttggttgtgtaaatgaagaaactaaattgccactatactgacgtaaatgaatagatgtaattggaaagttaaagtaagtcatgaacccataaacaacattaaaaatttgccatggggaatttgaaacataatgaacaggacaattgaattcttcatgtaattgtctataccaatctgcaattccatcaacttcacaactcgtgtatggttttgaaaaaatgttacggaaaacttctcttttatcacctaaaactccgttttacgtatagtatcatctatatcagtaataacactgacaccacttgactcaacaatttccactgttgttgtctgtaatactgaagtatcaatcacagaagatacagcaacataacttggtttatatgatgtcaccaatgacatttgaaatatcccaaaattatcagttgttaatgtagctccaactaattgatcaactggctcatcagagccaattgtaacattcaacggtgttcctgatatatttttagctaatattcctttcattctggaagtgaccgtatcatcaggcatagcagtaattgacatagaagttgaatcatcatcatctttcaaatttgagattctatcttgatttacaattgcatctttcatttcattttctatttgatctgaatctaaatcattttcattatcatttgatttgactatccttcttgccatactaaacaaaaatttgttttttcttgacataattcctgtcacataaacaatccccttaacacgtgtaacatactcaccgttttcatgtttacaatagtttggatataacgttatttgtgtgttctgtggtaattttaccatagattcagaattattatttgttgaataaccagcatctattttattaaatgcagatgaagtttcattataaatggatctgacataagttgattcctttgttgttttataagctcctgcaattttattgaatataaatgatgacatactgtcatcattccttgatccataaggctcaggcagaatctctgttcatattaccactaattttattgaaattgtgatgattcttttgtcttttttggtaataactatcaagaactcttttaaaatgcttttgttgttcttccttgtttaataagtaaaagaaaactatatctttactactatttctctttatgaacttatttataaatttcttcactaatcctttactagatcccctagaagggatgtattttaaccaagaaagtttcgtcacttttgaataatgtttgtgtcgattcagataaattcgttataatcaatgtataatcgaattgtgatgtatcagtaaatcggcttggttttgttagaataaaataacaaaattcaaaattagaaggcaaattgagagattattggttagctgtttggaaagatagactacaaatcaagtaatatacaaataagttaaaaccacacggttaaagccttgatacctcaaagtttaagtagttgtcagcctcagaaattttgacataatccattctcaatgatcctatataatatttcttattaaataatggaatgctattgttaaatgattttttcccactgataagaacaatttcttttactttaatcaactattgaaaaagaagttgttgaaattatcgaaaacatatatctgattcagttaatacatattgctgaaagaacgtttgatatatttaattgatacacccattaatacttttgccaggtacatactctataaatctataacatttttaatacaataacaaacagttattggaacagcaacaattaaactggtatattgcataatcatataaagaccaacacagtttaatggagtacatgttttatcagttggtttcattgcagcagcagttaaataaatttgaactgttgcactaggtaaacaaaactcaattgtacatgcaaaaattgccattggatcacttaaccagccaattctctttagcgctgatataaatacagtgccaattataggtaaaacacctaatctgaaaactgtatgacatacagcagttttccaaaatcctttagggacttgagaaaattctaatcttgctaaaactgaacctatcaaaagtaaccccattgggacacaaggatatcctaaatactcagcataaagaagaataaagtttagtgcaggctcttcatttggtgcattgggtaattgaattgttccattatttgtaaataatgcttttaaccatggtatcagtgcaattgttagtgctattattaaaacaatggaattgggtttcaacatattttctaaaaagaatatgatgtagtgtaacttatatttctttataaaaggtattttttcacctgagttgtcaacatcttttgctgtgagattagactctgttactattttcatgatttttgacatattttgattatatggttggtagttggaatattctttgacaagttcttgacttaataatatttctgagttgttgatatttaggttattatcagcatttctagaagactggtattttagaaatagcagctgttgaagattttattttggataatccagagtttaaagtggtaaccaatttcaaaggcatcaatgaatcaacggctatatttttatttaaaattgggttaggtccagcatctgactcattttcatactccgatgagattgaagttatttgtgagataggattttctgaagctgtatctaaaatttgaagtttattctcatcaagagttttttccaatgttggagttctttctaaatcagtcactgaaggagtaatatctagtttctccaaaccgacaggctcgatgtaatttttgtccctatattcaaaatcccaatcaaccaatttgaaaagtccacaattaaattgaactacaacatacattgccaaccatataataacataagctgtacctttattttgttgatctaatgtgaataaagtaattgcttgtatataggagattggtatatctgagacattttgcataataccagctaaaatagcaccaccaacccatctatctttaggagtttttggaactggagtgaaaaggacaagaagggttgccatacatgcattgatagaatacattataaaagcacaaaagcaaataacaccaattgttttaatatcatcaattgaaatgtaggaaacaattttatcgaaaaccaaagctggtaggaaaatcatcataaccatatcagagaaggctctagctgcagttacaccaaaataacctttacgtgtaacgaaaaaacctgttcctataatcaaatacattctaatcattggcatgactgaggagtaaataatactacctaatttaacatttgacatgattgcagtttattagaagaaggtcgattaattaaaacatttagtattagaaagaattattaagtatataagctgactgtactttgctttatttttaaaaaagattttcattagatacacatagattgaaaaaattgtgcaaattcaatgattcatcaatagggtggattatttaacaaagaatatttgaatttttttgcgccagtttccttattgagtaattttgattttgttatcgtaaaagtttcccgattaggatatcctactgaaaacttaaaattatttagaaggctcagcattttgtatagttttgaaaagtatattaatgctttgctgtatttgaaagtactagtaaatggtgtattttcttttgagaaactcaaagaaaatggacgagattgtaatactctctacacaaagtggtgaaatctgtgacaaattaaaccatcttaagaaaagcactggttacagcaatcacgtcatcgtgaaagaagttgcccacactgtgaaaagatggattataattgtttacatcaatcatataagaaaaaaatcattgttagagcagataaaaatagcttttaaccatggtaataaactcatagaacaggtaataccagtagaagagaatgaatctgcgataccactgcatcatctattacctggtaagattcatattataaacaacatttcagaattacaattttattcaatcgaaaatccctttattacaatgtttcttgaatgttttgccaccattgaagagctgagccctccaataacagtaatgtgctttcattctcctcaatggggaaaatttgaagggcaagaaattgaacaaggggagaaaattgaaattattttacctgctgagccctctttattagcaaaaaaattaatttctgagagagaggcggctcaatcttctcaacggtttattattgtaccttctggtgctgtatctcatcttattggacgtcagggtaagactattgaacaattacgtcgtcaaacatgcgctcaaattaaaatcatgtcagataataaatcacctgaaatgcattcaatgcagagtatacgtataaggggtcaaataaaggaagttgaggtggcgcagcaactattagaagttcaaatagcagaatggcgcagtaagaatactgtttaaataaattttatcataatctgaaaagttacccgcttctacggtttcccaaaagggcaatctcctataagaaaaaaatatctctcaccaactcactccccgcaccactcatactaatattttttttttttttcaggtgggttctataaaaattttccactaggggttgttgcttagaattttgttaatactagaaaaaatttaatgaaattgaattaaaatgtatgataactttcttttcacttttggtttagctctttcaactaacaacagaaataatgtctgaaggtactttcgctggtgcaattggtattgatttaggtactacctattcttgtgtcgctgtttacgataacactactggtgttgaaattattgcaaatgaacaaggtaacagagttaccccatctttcgttgctttcactccagaagaaagattaattggtgatgctgcaaagaatcaagctgctttaaacccaaccaacacctgttttcgatgcaaagagattaattggtagagctttcagtgaagaatctgttcaaaaagatatcaagacctggccattcaaggttatcgatgataatggtaacccaaagattgaagtttcttacttagaagaaaccaaggttttctccccacaagaaatttcttccatggttttaactaaaatgaaagaaattgcagaagctaaattaggtcaagctgttgataaggctgttgttaccgttccagcttatttcaatgattcccaaagacaagcaactaaggatgcaggttccattgcaggtttagatgttttaagaattattaacgaaccaaccgctgctgcaatcgcttacggtttaggtgcaggtaaatccgaacacgaaaaacacattttaattttcgatttaggtggaggtactttcgatgtctctttattacatattgcaggtggtgttttcactgttaaggcaacttcaggtgatactcatttaggtggtcaagatttcgatactaacttattagaacacttcaagaaagaattccaaaagaagactggtttagatatctctaacgatgcaagagctttaagaagattaagaactgcttgtgaaagagcaaagagaaccttatcttcagttgctcaaactaccgttgaagtcgattccttatttgaaggtgaagatttctctgctaacattaccagagcaagattcgaagacttaaactctgctttattcaaatctactttaaccccagttgaacaagtcttaaaggattcaggtttaggtaaagaaaagattgatgaagttgtccttgttggtggttctaccagaattccaaaggtccaaaagatgttatctgacttctttgatggtaaacaattagaaaaatctattaacccagatgaagctgttgctttcggtgctgctgttcaaggtgctatcttaaccggtcaatctacttctgatgaaactaaagatttattattattagatgttattccattatctttaggtgttgctatgcaaggtaatgttttcgctccagttgttccaagaaacactactgttccaactattaagagaagaactttcacaactgttgcagatcaccaaactactgttcaattcccagtctaccaaggtgaaagagttaactgtactgaaaacactttattaggtgaattcgacttaaagggtgttccaccaatgccagctggtgaaccagtcttagaagcaattttcgaaattgatgctaatggtatcttaaaggttactgctgttgaaaaatctactggtaaatccgctaacattactatctccaactcaattggtagattatctaacgatgatattcaaaagatgattgatgatgctgataaattcaagaaggctgatgaagaattctccaagaaacatgaagctaagcaaaaattagaagcttacgttacttctattgaaggtaccgttactgatccagtcttatctgcaaagatcaagaagggttcaaaggctaagattgaagctgctttatctgatgctttagctgcattagaaattgaagattcatctgctgatgacttaagaaaggctgaattagctttaaagagagtcgttaccaaggctatggcaactcgttaagtttgaaatttaagtttaattcatatctatctatttattactcctaattttaactttcctcttatataatttaaaaacataaagtaccacattttatatataaccacatctttatacttttgatactgcacatataactcgatcaatgtaatgattcttttaagtgtaacttgttccgacatccttttatgaggataagcttatcttgaaagatttgacagggcttttttattcttctaggatttgctcagaaatttttcgttttttcttcagcctgttttaagttgatgcattatgatctttcttggtatatacttgatttgtatacatccctttgttatcacttctttctaagcaaacatgatattccatttatcagtatcatctatttggatattttacacgttactaagcgtggtatttgcaaatacatcggctgctaaaatacatgatctttactatagagtagaatatataaatgccaatcctgatggcgttatggaaagacaagttatttcttttaatggaagttggccattacctacaattgaagttgatgttggagacagggtacggttacatttaattaatggacttgaagatgcaactacttcattacattttcatggtttgaagatgaaaggtgttaatcacatggatggccccgttggtgtgacccaatgcccgataagtgcggtgattcaatggtgtatgattttatcgttgaacagtcaggaactttttggtatcatagtcatagtggttctcagtatagtgatggtctcagaggtctgtttattgttcatgatgctgaaaaggaaaataactataaatttgatcatgaattattttggagtattagtgattggtaccacttacctagttctgctttagttgagagacaattgactaggatataatccaactggtgcagaacctgtaccacagaatattcttttcaatgattcaagaaatgtcactgttaatattgattatgatacaacatatttaatcagaatagctaatatcggtatcatggtatcacagtatttttcaattcctggctatgaatttgatgttattgaaatcgatggtgtctacacaaaacctcaagctacagaaatgatatatttaactgtaggtcaaagagctagtattcttttaagaaccaaatcaaaggaagatgctacttctaatattgctatcattacttcaatcgatagttcaatgcttgatgttgtacctgatgacttagaattgaattcaataaattatatgaaatatgacgaaaagctcccatcaccagaaatgccgaaatgggtcaacgaaccagatgaactttgaacctcttgatgatttaactcttattccatatgttcctcgtccccttttaactgatccagattatagaattgaacttgtattgcatatggaaaatttaggtgatggtgttaattacgcattttttaataataacacatatgttgcaccaaaggtaccaactttattaacagttttaagtgctccacaggctctcaaaaaagatgcaagaatatatggttccaacaccaacagttttgttttaaatgcaggtgaggttattgaaattgtagttaacaatgaagatgacaataaacatccaatgcacatgcacggtcatcaattccaagttgtttcaagatcagaaagctttgaagaacctgttcattataacccagatgatccaaatttgaaacttccggaattcccaacaatgagagatactgtacttgttgaaggtaatggatatcttgtattgagattcacagctaataacccaggtgtttggttcttccactgccatttagatttccatcttgaacaaggtttagcagttactttgattgaagctccagatttgattgatataacattaccagaagagcaaatcgatatgtgtaagagatccaatgtttcatacaaaggtaatgcagccggtaatcatcatgatttcttaaatttgaaaggtgagaacaaacagccagaaccattaccagaaggattcactcttaaaggctatattgctctggctgtttgtactgcagttgcattgtttggattatggagtatctatgagtttggtatgagagatgttacagaaacagaaacagataagattttaattgaacaaagagttacacaaaactatattgaggaacttgaaaaacttaaattaaactccggaagttcatccattgaatcagtaaatgaacttaatgatttgatagcagaagttactcttcttaataggaaactctcaactttgtaaatcttaatttataaaacttttataatgctacgaaaataaaaaaaaataatacttcaacgagatcttttctaatctaatcttactatttgagtaaacggtttaagtttaacaaactatattttgtacataaacacttgaattacaaaaacttatttatattcaagagtaaattagtgactgtgagaatgttcttcatcaccatgactatgactgtgtccatgttcatgtcctccatcatcatcttcatcatcatcttcgttaccactggaactaaagtcattttcatcagcacctgagaaatcaccatactgacttggaccactggaaccaaaatttggagcaccagcaccaccaaattgtttagctaattgagagatatcaaaatcacccatatcacccataccaccaagacctgccatatcacccatgccacccatgccacccatacctgccatatcagccataccgcccataccacttaaatcttcagcttcaacttcatcttgttcatcttcatcaacccatctatcaaaatcagtacgaatatttctgtatttaattttatccttggttaaacgtggccagtattcttcttctaaatctttcttttctaaaacaacgaaaatatgagaacctgtgatggtttgacgtacagatgatgcatcaatttctttgaagaaatcaatgtgtaagtcatattcttcttcagtagttgtacttttcgcttttaaatctaatgaagtatcggaaatatcaaatactaaagtagattgttcagggatctttaacattgattgtaagatagataatattctttgatttatcactaacatttgatctttgtgcccataggactataaaatttaatgaattgttagtatttacttcttcattcaagtcaattgtgtaatatacataccttctggtgcaattggagccattttcagttgtattgttgaagaaagaagaagttaaaagttaaagataaaagttgaagttataagttgaagaaatagcattaaaacgccaccgaaagttctcgaacttatattgtagaagtgatgcaatttcaaaattttaactttcagttgataattttcatgtaatgacacgtttatcttgtattaaccattcaatgttatagtatcaaagtattgtcggagtaaaattaatatacactgtacatattatatataattagatacaaagttctgttacaaattctgaacatataaccttaacgttgtcgacgacgacgtggaacagctcttggtctattgagcatttgttcaggagttgcttgttgttgaccaaatatcgttgatggatcaacatttgcgattgcttgacctgaaaagttaatattaggagtaccggaacgtgtggtgctttgtgagtttggcatactagctccaccaaaattaaaagttgtagatgcattgttcatgccatttccgttaccattgtttccaaacatattattattagctgtattgataccaccaaacatgttaccgttactatttgaattattcataccaccaaagccatttggagtagcaccaaatcctgtattggcaatatttgaattattgtttgtagcaccaaaattaaacccagaagtaccaacaggagattgtgattgagataaatccagcatttggtgcagcagctagtggaggaaaagctgttgtattaaaagagaacattttacctggagtggtcgatgttgcaggtacattgttaggttgagaaccagaacctaatggtttagattgaccaaacatattagttgttgatgaagtatttgaaccggaaccaaagttgaaacttgatggagtaccaccattagcattgtttgcatttgcactcaaagcaccattaatctgtgttgtacttggcttatttgaagcaaaattaaatgtagaaccattggttgcaccattagcaatattgttgaaacctggaagtgtagttgtggcagttgattttgcacctccaaagccaaaagcggtgttatttctttttgcagatggttcaatagtatcggcgtcatccttcggtttatctgttttcataccaaaattgagagatgagacaggagtatttgcaccaaaattgaagtttgaagctggttttgactctgcaggtttggtagctccaggagtggaagaactaccaaaaccaaaactgactggttttacagcagtggaaggagttgaagcatttccaaaactaaaagatggggtggatttagtttcctctggtttggttgttaaattagtactagttgattgaccaaatgtaatacctgaaattttgttttcttctggttttgttgttgaattagtagtagctgattgaccaaacgtaataccttgagattttattttcttctggtttagtagaatttgctgaacctataccaaaattaaatgcaggagtagccttcttttcctccgatttagtcagtggtttctgtagctgttgtattaccaaagctaaaagatgtaggctttggagcttcagctggtttgaatgtagttgagggtttcgaattatcaccaaaattaagtgttggcatagtagtaccttcggttttttcagcaatttgaggtttagcagcactatcggttgaaccaaaaccaccgaaagaaaaactactactttctttattagcaccaaaagtaggtactttatcatccttttcggattcctttttatctgtattagacacaccaaacgatggcaagtttgtttttggtacagttaatttgtcagcagttgcgttattaccaaagctgaaagatgatgtaggtttagttgattccattttaccaaatgaaaatgaaggagtggttggtttggtatcagcatttgtagttaaatctgaaggtttagttgtaccaaataatgcaggaagttttgttcctgttaaagtttcagatgatggtttatctgttgaaacaccaaatttgaacccagatggttgtaatgccttagatttaacatccatgcttggatcattcagagcatctgcatcaacaacttcttcaattaaggaatgatttagcaccaaataaaggtttagaaggtactgatttggattgtccaaaactaaacgatggtgtagttgtagcaggtttgtcagtttcttctttttgctgtccaaatgaaaatgatggagtagtagaagtagtgtctgatttggaagcagatggttcagtaggttttgagaaaccaaatgaaaatgatgaggtaggttttttttcttcagacttcttaacatcaggtttagcagcttcaaatttgaatccgcttgaaggaattgcagcaggttctgcaactttagttaggtttgatgatatacttgtttttgttggaattttaatttcttcctttggtaaatctttctttaatggactttctttttctgtttctggttttggaatgaaacttcttgttttggaagaaagctcaaaagttgctgttttagaattatcattaaatcttaatttacttactggatttgaatcaactggtttgacaatatcatcaactttttcatcaacctttacatcatcagtatcatcaggaactgtatctaataaacttataccgaaaactcctgatttatttcttctatcagctggtaaatttttgaagtccacctttttattatatttggaatattttaatttatcgttgacacttttaccaacttttttagcacttgaattgtttatatgactagtatgctttttgatataacttaaacgatatcttctatatttttccaattccatcattttcttcaattgaacaagattagcacgctcaagtggatcagtttgtgaaaataatggtgttaatcctaatttttcagcatcatctataatcattaaatcatctatatttgaatttgaacttatatttgaatttaaattttcatcattattaaatacaacaattgcattatcattttcattagcaacactattcttatcacttttattcaatgaattttcatcatccacaatatttgttgattctgcattattttctattaccgaattgtttgcaattgagtcattcatactattagataaaaattcattttcctttttcaaggcattataataagcttccaattgtctagcagtaattggaccattggaatattgaaatgaaaaatcatcaccaggagcaaatacgggagttgattgtctatcaggaattacatcactagatttaggtagtgaactaggtctattaacatgttgttgctgttgttgttgttgttgaataggatagttttgttggttatttttctgtccaaagattgaaaatatactatcttttattttagctattttagaaacaactgagctagatctgttgtcattattaatttcattgtcttcgaaggattgtgaacgcacccttttaccaatcatttttaaaattgtttcaatatcttgaaatgaaataaaattaatccaaagggggtgtttacgccactagtttatcagtaactgaaacaatccaataggatatataaaatacaatagattacaattaaaagataaacaacgaaaagtagagtaaaatatagaataaaatattgtgtaagagaagtgtttcactggaaaaaaatgacgagtaacagagggacatcggaaaattgttgaaatttccgagctttggtgtttgttatacatgtctttgcatgtttatgttgggatatatacaggacaagatatgatcaatgatgggatggattgggatgctttgaatactattgaggagagcttgaagagaagttgggtttggtttgctgaaagtgatcagttagtggaccatgagacaagaaaatctcaaaatgacatatcacttgaatgtgaactgaaattacaacagttgaattcaattgatatagagtttttatcagatgggagacattttaatcgaatgttatccttttgtggaaggttttattataacaaagaatcatgtgtgccttgggcttcagagaaaagttgccaatattccaaggaaatcgtcaacaaactaatacaaattgaccagagtaaagtaatagagacaattatctctgatgttgtcacagttttgaatgaaattaaacaactcggattgtccaataatgtcaatatttcaggatacagacaacaaacaagacttgcaatcaatcagaaattattaggacaaaattacagtaaagtattagatcaaatggattcatttaagcttcaacatgtaactaggatgggatcaattaacattttgatagaaaatgcagatattgaatcaaattggagatatattctaccatttttattaacttttttagatgatgctgatctaggggtgaaaagagaagcatgtaattcattaaacgaaatattcaaatcattgttatccagtgaaaagataaagaataatataattttaaaatctcaaacaatgccattatttaccaatgcaatgcaagcattattacttgcattaccatcattaacacctgaatggaaaagtcgacttatattaccacttacctatgaaacaacctttcgattatataaattagcaataccaaatgaattagaaagatacacaagattaggcggtttactaaatgatacattacttccatcattgagtaaatgtaaagattacgtggaattgacattaataatactcagcattttgaaagatttcattaaagaatgtgatggttttgcaatagttttatgcaaacaaatcatctatacattaattaccatattaatggatccatttatagtacatgcagataaggttgtgttaggtattattgatattttacaggattgtatagatgaaattccaaaggaacgtcgacacaaatattattatgatatcaagggatgtatgggcatcccttgagagacgtattgataggagagatgggtactttcagacattggaaaaggaaaagatagataaacttatgaaaagtgttgaaaaagagagaacatgaaattctgatatttttcccgtaacatgttttccatgtttttattcatgattgtgtattatttatatattatatatcgatttttaataacaattttttatataagacaatgtcgtcaattaaaccattccaggccactgaccttttcaattttacaccaatcaatcttgatccattaacagaaaacttttatttatacttttaccatcaatatctgtacacatggccaacattatcatataaatcagtcaatgaaaatcaagaaccaacaggttatatgttagccaagactgaaggtcaaggtaaagaatggcatgcacatatatctgcagtaacagttgatccaaattatcgtagagttagtttaggttcatatttatgtgaacaattgaaaattgtcgttgaaccagagagaccaataaatgcatggtttattgatttattcgttaaatgttctaataaaactgcaattacaatgtatgaaaaattaggttatagtgtatttcgacgtgttattggatattatgaaacaggggctacaccaccaacggatattaaaaaggtaaatgatgatattgatgcatacgatatgagaataagtttaaaacgagataccaaaaatgaaactgttagagataatggaaggaaaatgcatgtcttacctgaggaagttgtattttagggatagttatttataaagtaaagtagaattaatatactaatacaatagattaagtattacatttccaaatacttatctttttatcaactgcaccacatactgccattacttcaaattgtgaattaagaccatatctaccaatgaatgcagactttgcacgtccatcattagaatcaagagtttcgaaaactgtacctgatcttaaatcaaatccacgtaatttaccatcatctccaggtatccaaacacctgaacaatttggacgtgagagtaaaatagcattagaatatttgtcttgtggtgataatgagttaaaattagaaaatatataagaacgtaatatttgtgtatttgattggaaagattctgtgttttctttattatattcatatagctttgttaattcactaaataaaatttcctctttatcatcttcaggttttataatttcatgtattgatggaactactagtgtaattaatcgcatataaggtatatgatctgtaccaactgtgattatcttatcattattcagtgatgaaacatttgaaatttcagtaatagccattggttggaatgaatgacttgaaaactcagagtcattaagtgataattttgccaattcaaccaatttagaatcattatgtgatgttatagtgaataatgttaataatgaagaatccaaccttcccactataactattggtagatttgttttagtatcttgtaaaattaaaagacatgttggattagtaaatagtttataatcacctattatttcaaaatcgatagagttctcatcatcaatattttgtaaaactctaccaacagttatacgactatcccagccaattgatgcaaaataaccaattaatttagggttcagagcatcattaaatgataagaatttgaaatcagttatcaatcttctatgtaatttaagaggtgaagtaactaaactaagaatgaattgtcaaagtatccgatgaattatcaggtaataaagaagttgatgcaatattaccattcatatcacataatacaatatgagaagtaccatcaattccaatgacagttttaatttgttgaccattaccaaagacatcaaatttagaaagtacgaatttgattagtatcgagatcaataataaataaatattttgtatttgttaggaaaattgccaaattatatgccttatcattgatgattgcattaaaatatgatgatgaaatgattaatgcagataatgtaccaagatttaaagtttgatgaacatttggaatagtaatagaccagtgaggtaattcaatctttttagatttaatcagttcagaatgaacaattgtatcaagtttattaacttcatcttcatctttataatcaacagcattgctagaattattagattctaaatagttaattctatcagcaagaattgaatctaatgattcatcagttatctaaaggtttatttgggttaaaacgtacacctaattcttgttcaaaggcagataatgtgtttgtgtatccgtgagagcgtaagtagtgtgccaccagggcattagcatgtttttccattgtttaattgacaaaaataagggatcaattatggggataagtcatgttactaaagtattgtaagttaatataaagataactttaccaagcctccacctgcacgtgacacaatacaggtcaagtctacaaacaaaaccctccacaatacccctttacaccgcacacattaccagtgcgtcattagaaaaaaacaaaaaagatgtcccaaaacggtaatgaatagaaaaatagaaaagaaaagataattttttcatagccaaaaagcgaggggaaatctacccaccaaaatcaaggggaatcactccccctgtccgcccattgcgaaaaagaccgtcactcctacctttgaagaacttactctcacttaatactataccacttttttaatgttagttgatttttattagtgaattattttcatcttggattttcatttaattttttaattattgttatatctttctttcatttattcaactaacaaactatctcaatatgggtaagggtaagccaagaggattaaactccgcaagaaagttgagagttcacagaagagataacaaatggtctgatcaatcttataaagcaagacttttaggtactgctttcaaatattcaccatttggtggttcttcccatgcaaaaggtatcgttttagaaaaaattggtattgaatcaaagcaaccaaattctgctattagaaagtgtgtcagagttcaattaatcaaaaacggtaagagagttactgctttcgttccaaatgatggttgtcttaactatgttgatgaaaatgatgaagttttattagcaggtttcggtagaagaggtaaggctaagggtgatattccaggtgttagattcaaggttgttaaagtttctggtgtctctttattagctttatggaaagaaaagaaggaaaagccaagatcataattgtgtttactccattttgaatatcttattacaaaaggaaataaaaataatttattatctatgtttatatctcaaacttttactaatttaataaatatatgaaatattaaaaaaaaatatcgttttatcgtattataaatcataaattactttcaaaaattaaatttactactgtaatcattactagttaattaattattcagttcaatatacaagaatactagtcaaaaaacctatatattgagtcctctaccttcaatagagacaccatcctttttaacattcttcttcttttgtgacagttttgttaatttacgattaattgccttaaatctttcatccctattaattgatgatccaatacccattgataaaacactattatgttgtgattgtaatgcttgtaaattggattgtggtgcaattgtataaacagaagttctagcttctggtgctgctgctctctttcttctatctgcactttcttgatatagtgatttacgtacattctttttatcactattatcaatacttgattgtaattttgttctcttattaaatttctcaatatcaaatgttgcagttggaacatctcttgccctataattatcacttctacccataactggtctagtccaatctccaattaatttttctgcaattctctttaatgagttatcaactttctttgatttttggtaaaagaccattactttacctaatcctgattctctcaaatggatagttttaattggcatcttaactaattcattcaataaagctttttgaatttcaaatgatggtaatgactgcatcaggtaacggttctaaccaaatccttacagcttctaataaattgttatctagaattgaatcatataaattagatttcaataatgtatcctttacttgtggtaataattttaatttattaattgctggtttcttattattaactgcatcaatatctaaatatgctgcttccttcattaacccctttaaatgtgaaattgcttcatcttgcattgcctctaaatcaacatcattattctttctctttttcgttggtttctttaatattgcattaaacttttcttcaaattcacgtcttttacgtgtttgttcatcttcaatgtcttctgtgtattgttctattggttcttcagcatttctggattgtctctcctcatcattgttattagcttctccctcatcccaggcattatcaccattaagatcatccagttcattttgaagatcttctttatcctttgcactttccttttcattgtcatcataattattattattatcatcatcaatgttatctcccgtatcaatattatcttcattttcaatattatcttcatttttatcaacagtttcaccgtcagtctctaccttttcagtagtaccatccactactggttcttcattcactatgtcctgcacattctcctgttcaatatcactcattatctgctgtgctaaatatcaacaactgtaaccaccctataatgtaaaaaattgaccctcctcctatattaataaacttcgccctcgttgagactgagtgttttttttcatccatgaaaagacggacaatttcaattttcattactacacagtgtgttgaaatgaattgcttaataattttattatttcatttcattctactgctgttcatattagattcatatccttttccagcacatacacaatgaacggttacagtgaagaagaaatcagaaatgctatgatctaccaagagcaaatgaaaaaagctcaagaagaacaaactgatcttacccttaaattagctgccctcttagcagttggtctttgggcaatcccaactgcaattcacttcatcaagaagagtctttaaattatttgactatcctaaataatgcatctttgtatataagccatatctttaaatctcttgtttatcttctgtatatgcattaactcaacgaatataagaatcaaaatatgttttttttgttcaatttaattttacattaaatactatattacaatttatattatacaaatgaatgactattatgttattaattatcaataatgatatcattttagtaattcaagtactgattgataaccttgtgaatcaatatcaacagttccatcgactgatcgaatttgttcaattatcttatcgatgtttttacccatattattacctatatcgacaccatatttagcaataagtttttcatcctttagttcatccttttgtgaaagcattctctgacacgtttctcttgtttgttttgctagatataatatagtatccttaattggcattacatttgaaacaatttgttcatttttcatgaacatttctaatttccgtcgaataatctttgataaagctagtatctttttaaatttaattaaactttgtgtaagaactttttgtagttcacgttggtattcaatttcctgagttattcgttctattttattatttatatttgattctatctgtgaaactgtctgattcccatcattttcatcatcaatatttaataacttatgatgccttaatctaatatatccttcctctattaaattttctggtaacgtaaatacgtttcttaaagcatacacttcgaatttatcaaaattcttattaatattatgttcaagtaaagattccaatgttgccgtaccaattcgtatatcttcaatggtataacttttttcctctacaacatcatctacaatgatatcatcttccatatcatttgatttcttactggctcgttctttatcaagttgtaatttttgatcaacaaatatttgttcaagttgttcagtacatttatacattatttcattaattgcattaattatatcatcaataacactaataggtttatacccaaaatgctctataagcaattgtgttgtcctaacttctatatcgggcaccgtactcatctccgttaacattccattgataaagaaaaaacggttggtttagtacaaaattacagtttcatgttgttttcatagcgacaacaaatacatgccttaaatgaaagatcgatgatccatgactttacacacttctttgaatttatacttctttattgatctagtccttcactagctagctatacatacagtctaaaatctatataattaatatcattcctaatataataatttaaagtgaatatatctctgtaatctaatcagaatcagaatcggaatctttttcactactgctctttgaatcatcatcactatcactatcgctatcactactactacctttatcattattattatcactatcactatcatcactttctttatattgaggaataactgcatcatcggtagttaatggttgaatttctggtaattctgtttcttctatgttttcaacaactacatcattgcttgattcattattattatcatcatcaaatttcatatgttttttaatattatctttaatattatcttccataacaacaggttgactatccttttccataccaggagttaataatgtaccttcaactgccaatcctttaccattaacatgtaatgcacgtaccgtgaatttgattttaccatctattgcaactccattaccatcacaccaataacccaattttttgaaagaattattagattttggtgctaatgatgtagctgatgatgattgatcattattttcatttaaatttgaagtttcattatcaatttccatttcattttcatctgcttgatttggtacaaaataccaatcttgtggtatataaaattttttaatacttgcattgaaaacatcatgaattaataaaccaatatgactttgtgattgaataacactataaccttctaaataatctccaatttttggtcctccaaataatgaagtctacataaacccaaagaaatgtaaatggtgtctcatttgcaacttttgctaaatatttatattcaattttactatcttcatcattattaagattttcatttgatagtttaacattattatatgatataataacaccttcaattgttggattatatgtcattactaaaggatctaaatgttgttgacgtaaaccttcaataggatgttctaaatgtattggagcaagggaaagatacatctttgcacgtacacgatggaaacattttgataatcctgtatcattatcaattacactaacaatttcacttgtagtgacttcttcagtcttattctttttaataataacaggttcaaccacatcccctgtttcagaaaatcttctttttgtaccaactactgattcagtcattcccactttgctactaaatcctgaataaaatatactgattaaaagttgttgctctccttaagttaacaactcaaaaatttttcatctccatgcagagaggaagaaaaaaaaatttaaatttttttaaaatctttattacctaatactattatgattattatggtttacgtaatgtacttaacctatttactattatacactgaatactaacgtcttctaaataatctggataaacgattggatccactggattcatttggagtggatatattacctgtagatgccacaggaggaggtcttaaagtggttcttggaattggttgttgagattgcatcatagccatattatattgtctcataggtggtggaggtggggtataagtgtgatcatcagttacaacttgttcatgaccttcaaaatgattctgtttaaatacttcaccctcttgtgaattgattttcctaaataatggtttatatcctgcccatttttgtttaatttgcttttggaaatgttgtggagtttgtgcatcctcatcttcggtatactctggaactccggtaaatctaacctttttcactacactagattcttgatcttcatcgattcggcttacttcatgttctggaacaacaactatattcccaataactgaatttctacgtgaaatacttgctgatcgtgatcttgatccagtccttgataatgatactgaatttgatctacttaatggacttgataatgataacgtaccatttttatttgcagaattcatagttgcagaattgcttcggctcctagaaggtgatccatttattgatccagcatttgttgatgataaatccccattactaccatttctcaatggggaaagtattgttcttttgttattgttaatattaggttgtttagcatttggactttgattggaattagatctgcttctattagccaattgtattttcagtgcattttgtgcttctaatgattttgatttgatagaatttaatggactgcttggaaattcagttaatgattcaaccttaactatatcatctgtagcaatctcttttgtcgttgttggtgttggttgaacaattttcaaatctggcccatcacccaatgctagcttttcaatttctgcacttaatttatcatcaatattttcttcaaacttgatttctggatgtccattggctaaaatatgctcattctttgtttcctttacaacgatagtatcttcaacatcagaagatcctaatgattccttatcttgtgctttttctcttaccttctctacttcttcttctttctccttttcatcttctgattttgtagtcattttcacagtctctaatggtttactatacattgtacctttttgagaagatttcattatatgttgttgtaacctttgttgagcagttaaatgaaaattgccaacacttttactagccagagcagcagctctaatatgatcagttctttctttctctaattggctttgtagatttgttgtaccaataacactacgtcttctttgtaatgaaacatttgatgcattgacagcagttactctaggacttgaatttgagccagagcttgaattagaattagatgtagaaattgcactggaaggacttaataaattaacactggctcttctttgtaacatctgttgtctatttctcatcacactaggggatgaagttaatgaatttgttcttgatgaattagaacttggtgtacttcgaatactaggtgatctaattacacctgttctacttggtgattcagtaatcgatccatttgatgaccttctctgaatttgtccaatctttgggggttctgcaaattcatcgaattcatcatttcccatagccatatctgatatcgattttttcttaatgactaaacctctagcattatccgttctcgttagggaattagatcttgaagctgtagcagatgtacttcctgctggttgaggtctataaaatggtgaacaagaggagccagttaatgaagataaacttgatgctggttgtgagactgttcccggagttccaataacagaggcaggtcttctcattgacaaactgttttttctttgaatgaccgtagatgatgcagttgccgttgttggtgatgtcattggtgatgcagctggagatgatgttgtgttttcatcaatttgccccatagaagcaactcgcctggaactactttgtaaggttttattttgtgatggattattgacaattgaagatgaagacattctatgtgataattgtgctttcaattgcttttgattctcggccataatacttaatcttttagccttttcagttgctgctctttctttcaatttctctctcagatattctttattaaaatcattggatttaccttcaacacaaatttcagtccattcattatgaaatcttttcaaaacagcaagcattttactaattaatgtaatcatatctaatgaagttttcctgaattcagagacaaaaatatttgaatccattgataaatttttaatttctgatcgtttagcatatttggaaatcagtgttaatatcatactattttgttttgattgtgcaaaatggaagctcatttgcgttaatatttcacgtaattctttcctgtgtctcatgtatggagtaaaatattgaatattttgaaaataaattgatttacctgattttctaatttcaacatataaatcagccactcttatcaatgaaaggtacattgaataaagcggagttatattagaagattgtgagatattggtagatttagtaattgatgtgattgattgacgaatatttgtgcttaatttatcaacaatattttgaaatattgacaatttcatctctaaaaatctgaattgatttatcagataaaattttaaaattgattcttgatgtttaatatcaataataggtatatcatgaaaagctaattgttcgattatatctaattcattaaaatccaatgtaacaagttttttagataatgtttctttagtttcatttgttgcatgttgcttattatattgatttaatgcagcatcgaatcttttcataataacattattaacatttattaataaaagttctaataatacaattgtatcgacaactttcttacgattcggtaatgggacttgtttatctaatgaaattccgtatggtccgattggtgcatttctactaatattttccagtgaatcaaatgatattggggataaaataagcggcacatcaattgattgagatgcattatatttaagacaattttgtaatagttctgatcttctatagaaattatcattaatgttaaatattgtaccagataataacattatagattgtgggtcataaattatatcatggtctgttttcagagttttcttaattttcaaaacttgagataacaataactccactttaacagagctgtaataatactgcagtaacttagcatcaattggaaaaagagtccttgatgtctgcatggttaaacgtggagagtatgataaagtgagagaagtaataattgaatataaaatatatggggtaactaactgtaacagtatcttcagggaagaacaccaatctttaattactgcaaacataaaattaatcaagataaagaaattcaattttctttaaggcgtgaatacacacacacgtctttgaaatctgtattattactttaattatatactttttggcgtggtgtggtttcttctgctttatttacaatgtatatatcgtgtcatgagtttgtattttcattatttagccagttctataaatacatttacaagagtaaaatattccttacctcttactgtacctttttacaggtaaaattaacgatgttttccaatcagccatttccaaacaacttccttttgtaactttcgattaccatcactatttcctccagtcttacctgcagaacctctaatgctttcaagaagacctttcttcgtgtcaacatcaaatttatccaattgtttagaactaaccattgtcattcttttaaccgcatgaagtcgacgaaggtaaacaatacacattgaaccacctgcaattgcactcaatgcaacaacacttccaaatgcaatatttgaattttcaatataatttttaagattcataccatagaatgcaggcagtagtgtagctattgtgattcctaatgtaaatatcgcaacacgtaattcaaataccattaatgaattacgattagcatcaagaataatattaacaatatcttcagtcgatttaatatcattaatcattgtctctgcttgttgaacaatttcatcacactgtttataataagattcaagtaacatttcaacttctcccgtgtctcgtacttcactaccttgttgaatcatatttggttcatcatttattgttgtatgatttacattcttatggttattcgttttgttgattgttactaacaggagaacttttagacttacctatggaggaaactccgctatctttatcatcatcacatgttaattttttaatttcataattttcggtaagatacatgttctctaaatcttcatcattatctagtaattcatctaaggtatttctaatcaaaagagatttttgataaaacattgttaaagcttttgaataaactaataaatctttcaaatttgcacgatcaatctgtgaatctaattcttttaaaatgttattaagtttatctaaatgacttcttaattcactctctaaaactgccataacattgactaaaatacattctaaagctttaaattcataattttgattaatcatattagtattataaccataatgttgaccatgtacacctaacattccaccatgaacaacttttgttctcattttattttccagatcatacataaacagacttaacctacctgcagatttagatgatgcggtatcgaaaatcagtacttcatttcttttaatcaatgctttaatatgtaataaattaattaatataccattacttctaacagctatacttggagcaacgtcgacattagttgcatcaattttccttaaatctcttgggaaaagtttattttgttgtaaaaatgatgatcttgggaattttttacttacagctctaacagtacctgtaaaatctattatagtacacgatactgtagatatatcaggtgaaattggtttcagtactttagaagttggtaatgtattggatgtattggatgcatttgtattatatggccgtacaaaatatggttttgtaattttatttattattcttcccttatatcgtatgattgtaggtattgtgttatttattggtataaacatagttcgaggcagcatttgataattattattaatgatatgtgatttgatttaatatttcttgtatttttcaacaagttttactcttttaacgactctaataagatatttcttctaaattaactgttctatctagatgattcaacaagtaataaatggagtggtaacagcaatctacgggaatcttcaaagatggaaaaacctttaaattggaattgattacggtaagtttgtttaatatttactatggattacgtaatgatcaaatgtgtgattaatggtctgtaacttagagttttacatgaacagttagctctggttcaacatgattatgtagatagagtataaggtagtagctgttgagaagacattataacttctttcaaaaaacaaaaaattgttataggaatctttaattattggattgattatgatacgtatattttatattattttgttttaaacatagagatatgattgattataaatatgaattgttaactaattaactaatcaaagaactttctgtttggagaaggaccaaacatttcaagtttaattgcaggaagtgcagattctgaaacgagtttaagtctttcatctaaagtattatcaactgaaattttacctgtaccattaatagcaagaacaccacctgcaagatctttatctaaatttctagtttcatcaactgtatattcaacagattgtcctgaagttttctcaaacttttcagctgcaattttagctgcttccttagcaactgaaagatctgcctttcttactctaaggaataactgaagtaatccattaaagtatagaaacattcttcaattaaaccagcaagaagtttcttatattctgccttatttgatgataatttctttaattcatcaagagtaccagagaagatagtttctaaagcttcctctctagttgctaaaacctttaatctagttttatttgcaatagtagatttagtaatttgttgtgcaagagaggctttcttaaatttatccttataggcagcatcaatagcattaatttcagaacgtacaattgaagctttctcaatttcatattcttcatctgccttaattttaatttctctagccttttcttcagcttctttcgttatgaaagattccattttcttcaattcaccttgaacttggtcatctgacagtgctctatttgaggacattatgtaatgattactgagagatacttaattaactagagaaacagtaatcaccaaaggtaataaaacaacctagtgttatcatcctccctcttcattatcaaaagaagcagccactgcgttgtgcgaaatgaaattttaattttactgaatttatttcctatattacgtaatcacatgaatattttactttacatgatataataataccagtcagatttattattattaatgttaatatctattttatcgtggtttcttactagcaagaatgtcaactatcacaagttggcgaaggctctatgctacatcagctaagaaaatccctaaaattaataaaaatgcttgtggaatacaacatttgtctgacggactacatgcacaaatatttcctaaaaaatctttaacaggtccttcaaataatttaactaaactatctcttaagtatcttcaagataatgaattattggggaaaccatgttctgaaaatccaccaataaattttaaattacctacattaaatggtgataatataaatcaacatttctataatattggtatgaaaagctcttataaatatgaaaatttaattgatgatttattgaaaatagggtcaacaccgttaccaattccaaaagaatggatatatcaatctggttggactcgatattcaccaaattctctaccagaatcggttccatatccattagaggatgaactagtgtatgattgtgaagttttatataaaacttctccatatgcagttatggcaacttgtttatctagaaaagcatggtactcttggtgttctccatatcttgtaggtgaaagtgatacaaacaatcatcttataccatttaatacagaggcacgtgaatgtttaatagttggacataatgtttcatttgatagagcaagagtattggaagaatatagtttaacaccttccaaagctttttatttggatacaatgtctttacatgttgcagttagtgggatgtgttctagacagagagggacctggatgaagtataaaaaaggtgttaaggagaaaattaaagaacaagagaaaactttagaagattatcgattaatggttcaaaactcagaattaagatataccctatccaatgccattttagatgaagaatctgctgatgatgatgataatttgagtatgagtttacgtgatgatccatggatgaaaacaagttctctgaataaattaagtgatgttgctgaactacattgtggaattaaaatggaaaaacaattaagagatcattttgcatcaactgatgtaaatgaaatacgtgatcttttccaaactctaatgacatattgtgctaaagatgtaattgcaacatatcatgtattatatgcagtttatccaatgtataaaaaaactgttccacatcctgttagttttgcagctttgagacatataacaacatcatttttaccaactaattctaaatgggaggattatatacatagatgtgaagaaatgtatcaagaatcaaaaagccgtgttgaatctcaagttcatttgatttgtaatagtgttgttgagttaaaggataaacatttgaatactataccgccatgggaaaacgatccatggttatctcaattagattggacaattgcacctgtgaaatataaaaaagatgggactccatttaaaagacaaaaacttccaggttatcctgaatggtacaagaaactagtcgttaaaaatgaacttaatttaacgatcaaatctagagtttgtctcttattgttgaaacttttatgggaaaataaaccaattttttggactgaaagtaaaggatggtgtttcgtagttgaaaactcagaaattgatgaatttgttgctaaaaattatcttcagtgtaatcctcaaattattttagaaatgtccctggaagatcccgaaacaaaaaagaaatttaaaggtaaagccaaaaaagcaatgaaagaattcaaagaaaaaagtttcatcaaaaagtaaagccactgaagtaactgaagaggaagagattaaatttgatgatgaaatagatacccaaaaagaattagaagatgatataaaatctctttatgttgaaaaggatgaactagtacgagaaaatttgaaaaagttaattaagagtggtaaaacattgttcaaaattccccatgaggatggtgcagatgcaagagtcacttcattaatttcaaaaccttttttgagatattatgaagaaggtatattgacatcaaatgaaccaattgctgaagatgcatttcaatcaaatgttagaaatagttactgggtatcttcaagagaacgtattatgaatcaatttgttgtttaccaaaacactttaaatcaacaagtaacagagaaagcaaaaaatatatctgaaactaaagatgaatttaaagatgcatctgaaaacacagatcaaccagagttaggttttatcattccacaaattataccaatgggtacaattactcgtagagctgttgagaaaacttggcttacagcatctaatgcgaagaaaaatagattaggatcagaacttaaatcattagttcaagcaccacctggatatgtatttgttggtgcagatgttgatagtgaagaactttggattgcatctttggttggtgattcagttttcaaattacatggtggtaccgccttaggttggatgacattagaaggaactaaaaatgctggaacggatttacattccaaaactgctaaaattttaggtatatctcgtaatgaagcaaaagttttcaattatggtagaatttatggtgcaggtgttaaatttgcgacatcattattaaagaaattcaatccttcaattactgatgaagaggctgataaagttgctaaaactttgtatgcagaaactaaaggtaatacaagtgttatcaaaaccccaacaaatactggtggagatgataaagtcaaaatatggtttggtggatctgagagtgttgttttcaacagattagaaaatattgctgaacaagatgatccaaaaactcctgttttaggtgcaggtatcacagctgcattaaatagaacaaatttgaactctaaatcatttttaccttcacgtatcaattgggcaattcaatcatctggtgttgactatttacatttattgttaatttcaatggagtatttatctagaatatatggtgttgatttaagattagctattactgtgcatgatgaagttagatatctggcaaaggaaaaagataaatataaatgtgcaatgttattacaaattgctaatttatggacgagagctatgttttgttatcaattaggaattgagaatataccacaaagttgtgctttcttctcatgtgttgatattgattttgttttacgtaaagaagttgattttgattgtattacaccatcaaatccacatccaattccacatggtgaaagtttagatatttatcaattactagaaaagccagaaatccaagaaatgttgaactctttgaatgatgaatctgagttaaagaatatatcaactgattttaagatccctagacctgtagaagcattagataaagcaatggatacccaaacaaaacttaaatggataaatttacaaatatcgaagaccaaggaagagtttagtaaacaaaagagaattttcttctctactgttgatcattccaaattagagaaatttagcaagaagttaataacggactgataacaaagtagatgaggttgtatgtgatggtttatttgaaagtaataattcaacaactgaattacttgatgcgggtgtagttttagaacaaattattgatcctatgattgaaaaacaggatgctaaatctaaatctaaagctaaatataaattgaagtccaggtcaaaaccaaaaactactaagaaggatgatgtcacagaaaacgcagaagattatacaataccaccatctgacgaatacaatttgtcgatgtcaccaacaagtttctttatagaacaaacttcggaagccttattaggagcaatacagaaaaagcaatccaagtctagcgaatcagcaactaattcaagatcaaaatcaagctcaaaaccaagatcaagatctgatggaatttccgtggatgatgattttagtacttcattgctcatagtcactctagtgaatttactatgcatgagctagaggaaatacaaaaaagctgatcgtgtatatagaatgtacaatataatatatctgtaattaatagaaaaataaaagaaatagtgtataaatatcatcaaaaatatcattgaaataagtaaaaaaataatatttaattaacataacgcacatgatagactacgacagaaaaaagtgtcgttatcaagtgatgctcgacttattccataatttgactctcttcaattctttgcaatttcgggatgtatgcatttttaatcagttagtggcgttattttgtctgatatattattgttatatactgaattgtagttatagtcaaggttaactaatagaaatgcatacaggatttgattggaatacaattccgggagtgcataatccacaaaatggcaatgtccagttatcaacccaatcagcggcaacacctggtaatgtcaaccgacaagcatcaatagatcattttgatgattactttaactctcaattgagtattaatcaacatagaggctctgtaaatggaacttcggatacacaaaataataatattgggaatttaagtcctcaagcatatttaaaacattcggtatcgtataatccatctacgaacaacaataataataatatcaataacactaactgctaataacaatactaatatgaataatacctaataataacactaataatagtagcaatcaaaacaactcgtcgaatattaacctagtagttctggaaatggattgtccaatattttcacaaaaatgagtttaaacaataacgtactttctcatagtgatgatactctagataagattaagtcatcaatggattcgaaaccttcaaatctcaaaaactcttttctggagccaattaaagaaacgattaaacattcgagtagtacagatactctaattgctgataatgatagttcgattccattatctttaacaatcaatgatatgtcaccaaaagaattgaaaacttacttgagatggtatgaaaatattcaagatagaaaagtaactacaaagatagtgacaatggatgatgtcttcaaatttatgtcaaatttcaaaattccagctcctatcaaggatagacttgtccaatcattctctaaatgggccaactctttaaatattggacaattctttgcattgatgagacttttagcacatgcattacatggtaagccgttgacgaaatctttaatcaaattgcctgcaccaattccaaatcctatatctattttatcattcaaaaagaaaggatgattcaacaaatagtgagaatgaagaagaaataagtgttaatgaaccagcaaaaaaattagatattgatagttttactgaatttattctgactggtgaaatgccaaccaattcaacaaagaaaaagaagaaaaataataaaagggtgaagttttcagatgttcttagcttttcttcatcgcctgtagaaaaggaagtaagtatggaaaatgctgcactaattgttaatcgacctgaacaacatgtacttgattataatttatctatgaatgatttattggcaaaactaaaaggtgagccaacatggttcacaaatagaaaatgccgcacaacaacaacaggtttatcaacaacagcaacagcagcaacagcaatatcctgagaatgaggaagaagaattaaaggacattcaaatagatacatttaaaaatatcacacaacgagaacttgataaacaaaattctggtgatgatttacaaccattaaaaccaaatttaacaggaagtgcatctaagtcaatgaaagaacattttatgcaacaatttgaacaaacttttaatttcaacaataccagcaattcattcaacgatatttcatcattatctgccgctacaccaacaggttctgttaaccaatctacaaattttacaatgaatgcaataccagaaagaccaactatgcaaactatgttttcatcaactcaagttcaatacccgctagctgctgatctgtcaccaaatacaggcaatacgtcacaatcacaacttccaaaacagccgcaagaatcaagcgacttactttggatttgttccacaaaatacacagcaaataagcaattttggagtaacaaataatcaagttttacaaactccacaacgattggctgggtcaatctctgcatcgccaccacctgttccaccacctcctagatcaagaaaatcatcaagagctgcacagacagctattccttcgatacctacacctatggctgttagtaataataatacgaataaaggtaatcctattttaccacctaaacctatgttgaatgaaaagcaaaagaaacaatatttatcattgtctgatgaaattggtaattctaatggaagtaacaataacaatatgaataataatatgaacaataatggtactaataacaataatggaaatcaattttccaatatgaatcaatataaccaaatgggtatgggtcaaatgaatcaattaaatatggcacagatgggacaaatgaatcaaatgaaccaaatgggacaagttaatcaaataaatcaaatgaatcaagtaggacaagtaggacaaatgggtcaaatgaattatatgaaccaattgaataatagagttggtggatcattgaatcaaatcaatcaaatcaatggatcaatgaacaatgttcctacaatgagacattttaatagcagttacgctggacaggaaccactttatgccaatatgcatcaacagccaccaccacaacagcaaccggcatacaataacggctggagtaattctcagcagcctcatcaacagccaccaccacaacagcaaccggcatacaataacggctggagtaattctcagcagcctcaacaacagcaacagacaggacaaccgggtgctcaacctaactggtcaggatggaatgtatagtgtagtgtagtgtagtgtagtggtttataatatagattttactatgtaaagattacgtaatcaaattttcactaagtgagaatgacgaaaaactgttgaaattgaaagacactttccagtagtggattagtaaagttaaattacagtttcatttactgaagtaccataacctcacagctttcacacataaacattaaagcatgcctcctgttcaacaagttcaagttcaatatcaacaacaatctctcttcgataaactgaagatgggtttccttatgggtgtatgtattcaataatgatttatttaattaataatacaaaataacgaatactaacataatttatcttctttcttttgtttcttacagtctacagttggtgcagtttccggtttagttttcggtggttacgcaattttgaaaagtggtgcaccaaatggtgttgttaatactttaggtcaatatattttaggttccgctggtttctttggtatgtttatgagtgttggttcaattattcgttctgaagatattcaagatgttcaattatcaaatatgggtaaaccaggtaattttcgctgaactaagagctagaatgatggctagacacatggtcaacatggaaaatatcaaaaagaacctttagagttattagaattattcaaaattctaaaattcttatgtatatcatgtatctagttttaactttcaaattaattttaaattaaaagtcaaaagaagttggaaagaaaataataagaaaataggttaaagatctaggttatcatcatctaaaagatgaaaataattttagtcgtttcctttttcatcaacttccttcttttacaataatatagtattttaaccagtgctccgctatcattcacactatacaatatctattatagttgccgtaatctataaaagaccctttctgcttaaaattatagtgtagatcgctttcaagtactggaaaatttgacaacatgaaacatggcgcagcaccattccaaacattgattccatttctgttcactgtttcatttacaatcaagatcaatagggaaacttaaatatagtttattatacatgaaactatgaaacaataacatgtcaaattatttaataatatttatcttttctgttttataaaacttatatcctccgttatatgccattttgatttgatttggatcgtttaattccagtttatgtgtatatatcatagttaaactttggaggtaaactttaaaagttgccatttatccacttactttaataatttgaattatttgtttatcaagattcttttgaaataatcagaatatagtttttatttcattaggggtataacaataaatttacatacatctaaactaattttggttatttttcattcctatcaaataaaaaacattgaatattataaatcataattatgaataataataactcaaaaaatttaagtagtcacatttcattaaaatctctgaatagaactccgtctgggaatatttatcatcatgatttgaaaaatatatttgcagttttgctattttgtttagaattaaagaatgatgtaaagaaagcttcatcaatcttaaaattcaacttcaagaaaactttcccttatacatttacagttgagaaagctattcaagtgatggctaatttgagtattaatttaaattataatatgacatcaactgttctgtcatatgaaatcaatgaaatttttgcttttgatttacttcaaatcttttattctgccaaactattacattgcccagaagataaaacttgtaaaaaaattacaagtaaaaaaatgactttacaaccaagtcctaaaggtgttgcaatattatatcaattttgtttgaaaagaggtatttcaaacttacaagatgttaaaattcctgaaatattattttcaaactttaattcaatgcaattgatggaatttgaaaggcatataagaactgataacattatttataatgagcattcagataaattgttatttgctcgtcttatgggaccatctatgaatatttggtcttcaaagaatggtcctgatcaaatacccaatttatcatctactttatcactgaaaccaaaattcaataatcagcaagtttttggtgcagataaatcaaatgattcaaatgatactcaaaataatactttaactgatagtgcagcatttttaaattatttaaggaagagacaatatgatgttgcatctgaagaaaatttaaatgtatcagatggtgatgaaagtaataacagtccttcgattagtgttacaaataattttaatgatgtatcaccattttatcacagattttttacaaatccggactcagattcccatattcaatactatgtatccaataaaggtgttagatttttcaaacaaaagattgtcagtatcaagggcaatgaagtcattgttaacaattgtttctctggaaaagctttagtccaatgtatttttgattgtactgatttaatgtattataaggatgcattgaaaattgcaaataattttcttaaatgggggttaattgaaaataaatcatataattttgaaagtgataaacaattcatgccaaacagagatgcattatatgtactaaccggtgctggaaaccaagcggtcaagtggtttgttaatgcaaatatatcaccagcaagttgtacaagtaaaaatgcgtcttttgattcaccatcttcagcttcaatgtctattaataaaaataaacttacattagctgctatattagcagatccaggtttgaaatatttattaagaactttcatgattgaaaatatgtgtgttgaaaatttgaatttatttgatgaaattattgaattccaaaagaaggtcaaaatattgaaaaaaatggtttctctgaaagataaagagaaaagtaaatatttagaagaaattaaaaatgataaagtttttgaaataacaatccaacaacaaaaatcaaatgcattaaattacaagaggttgactatttatactgcaatgaacaagttgacagaatattgtttatctaaactttacactatatttgcaatgtatctatccgaggatgcaccaaatgaggttaacattgattcaaaacttcgttttcaagttcaaaattatattcaatctgaaggtatattcaatggaagtgatatcaatatttctgatatcagaatgaagatgaacattcaaaatgataggactattgaaccactagaattagaagaatcagaagcttcaattaaggaagatgatgatgttaaagttgaagatagaaatggtgctcttgttgttgataagcaaattgacactaatgaaggtgataaaagttctgagaagtcaatatcaactcaaattgaagataagaagttcaataaacctgttaaatcacataagaatttgggcttaaagttgaaacatttaagagatgtcgatgttccggaagtttctccaactgacatattctttggaccaaaattaaaattcctggatgatatgggtgtttactacgaagaaatcaaaagaaaagtttatagaatgatggaaagagactcatatggtaagttcttagagtcagatttatttaaagaaaactacagttcttggctttgaagttacttatttaattttttgtttcatatatttttattaagtttgtataaagaaaatactaaatatacattgctccccatcccatatggagaacaaaaaagtttatgatcagctaatcaattgtagttatcattattggtgtgttgtatttatactattataatatgatattgggtttatccttttaacagattatgattaaattttttaaaatgaatagaattaattgattggatcaatggtagtacccttcttaatagtagcccaaccaattaatctgaaatgtttatcaatacgtctagataatgcaatcttttcatcaatttcagtacatgcaggagaagttaaagttaatctagccatatctgccttaacagccactactctagcaccggtagcagtggaaccaatgttgaccatcaacacatcatcaacttctaagtttctaaccttaaccttcttttgatcatcagtcttaacacctaataatcttcttaataagaaataattaacttcaatatcagtaaatactgaaggtaagttaccctttgcaccaacaacttgaccaacaagtctatcagctctacaaagtgttggatcaactttagtaccaacaccaattaaaccaccaggaaccgcaaattttaaatcattgttttctgcaaataaggatataatacttgaaaaaattgatttacattgaattttaccattatcatccttagtaacaatacctggtctaatttcaatttcatcaccaattctaaaaacaccacttaaaatggaaccacccgcaacaccaccctttaaatcattaatttctgaacctggtttattaacatcgaaagatctaataaccattaatcttggttgagctgaaaaatctcttaaaggaattggaattgattttgccatacacatattaacggcatcaatattatatttcaattgagcagaaattggaataattggagcaccatctgcaatggtacctttaatgaacttaagaatagatttttcatgttctaaagcagcttcctttttcattaaatcaaccttgttttgtaaaataacaacatgctttaatttcataatttcaatagcagctaaatgttcagaagtttgaggttgtggacaaggttcattacctgcaatcaataaaagtgccgcatccataacagctgcaccagacaacatagtactcattaaaatatcgtgacctggacaatcaacgaatgaaacatgtcttattaaattatatctaccatcacaaccttcacgttcacattttggatgaatttctttatcactcttatatgaacggtaacaatcaggttctggacattctggattattacatttgtagattttagcatttgcataacctaatttaatagtaatatttctttccaattcattcttgaatctaacggtttgaacaccggagatagctctaacaacagtagatttaccatgggcgacgtgaccaatagtaccaatattgatagttgcttgtctattaataatttcaggtgaaattggagttaaattagcaatatctggattaacaggttgttcaggtaatccaccaccttcttcaaattctctttttcttaattcttcttcagtttcaccattttcatcatctaaatctgcaaaactaacttttttactagcctttgaatcatcaactaattcatctaattcattttcactttcatatgcaggttcttcaactggttcgtcacaaccaactacaatatctggaatagcgtcttgaagttctgctggcattgtttacttaacgatataaactcggtaagagactttagattcacaatttataatttataaatcaaatccttccacttcatcctctcaaacaggattcaaatttcacttttcatgaaatttccaaaaaatcaaaaaaaaaattcgtgaaaattttaggtcggaaatttcagttgtttttaagcttagttgccgggaaatttccgcgcaactttcggaaatttagtgtttttccatttagatgatctattccagttgttgtgcctgttttatcttacattattttgaattttatttacaaattattatacattctattaaaaaaacagtaaattcttactctgcatgaaacccaaattcatccataactgactcaatatctttaaatagcatatccgaatcaatttcagtaccaagattccaattattagccgtgaaaacgtcattgttattcagatccatatttaagttcatattgttattgattaaacctggtgcagttaccatagatgattccaagttattattgttgttgttgttgttgttgttagattttgaattattattttcattattaatattattgtaattacttgtaatgtttagaacttgcttgcggtgatcgaacatggtgactttgtggattattatgattactttgtggtgtgaacatctttttgatagtggcttcagatgtatttgttgtatttgatggtgatttgtagttggaaatatatggtgaactatgtttactactatgagcactatcatttgaagtttcagctaatgcaattggttgaggatcaagtggaattgtactgataattcttctagcagcggattctggatgataattagatttcctcctacttgacaaactactatctttactttgagatctatattctttacccattgactctggagttccactatgactaattcttttagaaatatcaggaattgttgattcacttttaatggtatttggatgtgaaatactatcagtattatcattattatcatttctttcaccaacatcttcaacttcactatcagatcctgtacttccttcacttacactattcttctccctcgttggttttaatttaatcataccacatttttctcttaagacccataatgtatcaaagaaaatattagctgacattcttgatctaacattaatttgaaataatgattccggattgtcttcatccaatgttttaaataaattccatgttgatttcattataccacatgatctataagataaatcatgtttaataacggaagatttcattactaattcaattgcaatttgatataattgaataccagttgaaatatccagtatatttttatatgatgaattaattaatctcgcaattataactgatgcttgccatattactaaaatatatgaacttggtaaattattaacaaagtcaggtgctctatcttgtgagtttttacaatgttgaattatggctaaagccgcattatatgctttaattataccttttttcaattcaaaacttgcaatttctctattatccataaaataataacttaataaatgtaaccttgttgcatataatgataaaattctaaaatcatccattgagcattcctcataggcacataattttaattcaagttgattcaattcactttctaataattgaattaatggtaatctatcagatgcagggtttaattgtaattgatcaaatgaattattatttaaagttttctcaacttgagcttcaaatttttcaatttccagcatttgtcttaaacaatgtggaatttcatcaccatttaatgatgatgataatgataatgaaccaaaaggttggaaaaatcctgggaatccaaaaactgatgcaattgtttgagaaactatattacaagcaatccaagttctaatttgttcattcattaaatctttatttgttaatttcattctatcggatgttaaaccaggtgtatgtaaaccaattctaattgcttgataaaatgcaataccgattgtattccaacttgaatctgcacttaatgatgaagttaatggaggccaaaatgtataaattaaaaatgcttgaactgaataaacacttgaagcatttaaaattggttcatcaacttcatttggtacatatcttgtgattggagaaattgtaatttcagctaatatacctttcaaaattggtgataatttgaaatataatgatctacattcctctggtgtaattactggtaataatgtatgatgacctcttaatgctgtaaacataattgtccaaaataaagctgggcataatctataaattttttcaatttctttttccatatcaataactggcaataatggatgataataagttagaaatgttgaatataatacaacaatttgtttatcagttaatgtaatatcacctagtgtttttgaagtacactctaataatgatgatttgatatgtggtttccgtacgggacgattttgtgctttccatcttgaatacagattggaatcatgattagaactgttatagttgttattcatattattattacgttcagtgacatttgcggcagatattaatgttgagaaattgtaactgttaaccctgtttaagtttttactctgatctgaattatcaatattagtaccaatattattattgttattgctgttattattgagattattagtatatgaaggtaattgagccaatggagaatttgtatgattatttatcatttgaattggagagtaagatctagttaaagggctatttgccttggtggtattattagaatagaaagatgtacttcttgaaacatttattgattgtggttgattagatttacttgttgtaacagtatttatgaatgttgtatttgatattggaattggtataggagttggagttgtgatgttactactattaccattatttgttgttggatgaaatatatttggatcagggaagtgacataccggtgttaaattgattattattatttggttgtatagatttcagagatggtaagaattgattttgagtattatttatgaaataggcacttgattgtggtaataaattattatggctattatggttattactattaggtatatcattctgtacaaattttatattattgtagcttagaatttgaattactatttgaaattgggctattaattggactattatcagtcatactaattgaacctgaactgattttcaattttgattttataatttcatattctttaactaattcatcaattttagcccttttaaaagttcttttaaactcctgatcaagtttacaaggtatatttcgtttttcacatcttgaacatggaccaggttgtttctcagatgcatcacattttgccttttgttgtctacattctgtacaagcaattttcttcaaacgtttattttgtctttgtttattagatgattttgtattatctgatttactattatcctgaaacattttcatttgataattgattaaaatcgttatggttattgctattgttgttattagtattattattattggaatttttcatattatattttctagtccgtactccaggatgtaactcctgttccggcatttgcatatctgtttgactattgaattcggacatcatatatctatataatatgggttccaaataatggtataaatatacctttcagtatgataatattacagaatctacaaatataaactataaaggaaattaaaagatgcatgaaatcaactcaaaataaaataaaataaatttaataataataataataatacttaactgatcttaatgagagattttttttcctatagaaaaagttccggatttatttttcttaaaaagttatattgtactggtattctacagtagatgagatagtactatattaataataaagtgatcaactgactaagaagtgtataatgccatgtagaatatattctcacccccatatataaccgaatagcaagtgtaaaagacataaaagtcttcatctacggccccccattccagcacaataccgtaacattacacggcaaagttgaatttttccaaatttttcacttttctatgttttttaaaataaatttttgaaaaattggaaaatttcttttttatttttcatcggaatcggagatgtttgttgatggatggagttagagttgttgattatatgtttttgttgatcttgttgataaggattagataaaggattatatacgatgggagttcatgttttaagatctttacgtcaatcaaattcagatatacgtctactatggttttcagttttcattagaatgattagtttcggtataactaatcaagttttaaccttatatcttgcagaattgggtatatcagaagttaatattggtattttcatgtcattaacaatgattggtgattcaattatatcttatatacttacttggaattcaactaaaataggtaatagatttataatgttattgggtggatttttaatgataattgcaagtacaatatttgcaactggtactgaaaattttaattatttattatttgctgcaattgttggtgttatttcaccttctggtaatgatgcaggtccatttaaaagtattgaagaaactgtattggctaatttaactccacctaatcatagaccagaagtttatgcaattcattggattttaggttcattaggttcttcattaggttcaataagtgctggttttattgttgataaactttctaaaaattatggattttcaatgaaaaaggcttatagatatacattttatgttatcttagcaacatcaatctttaaatttatttcattattgttcatatcttatcgtgctgaaccttcttatatacctgattataaattatcaaataatgaaaatatagaaaataataatgattcaattaatgaaaatcaagataatattatggaacgttcatcttcattaacaagtgaaaatgatgaacatcgtccattgttaagaattcaatcaactgttgaacacacaacaataacaggattatcctcttcaacacaaaaaatcttattcaaattattagttccattcatgattgattcatttggttatggatttatgacaaatgcttggattgtttattattttgaaaaaagatatttgaaatctgcatttgtattaggtacattatttggatttgcaggtttaatgacatcaatttctgcattacctagtgcttggtttgctaaaaaatttggtccaattaaatcatcaattttgactcaaataccttgtggtttattctttattttaattccaattttaggttataatttccaatctgcttcaatattatacttattaaatcaattaactactgcctttgatgttgttccaagacaaatcattttaacttcattaattgaaccaatggaattaccaaaagttatgggtactgttaatattggtaaacaaattgcaagatcaattagtcctttttctacaggattttttgcagaggctggatgtttatgggtgtgctttgtaattgctggtagtttattaattttggcaaatgttatattagctatagatttcagtgatttagatgaaaaagttaaaaaattagaaagtattgatcatgatatataaatttaaggtcattaaaaagaaaatataggaaatagaaaatagaaaatgaattgtttgtttttatttttcgtttgtactattattatattttataggtcaggttgaatactaatcagtcttccaacatttgatgcaggtttatcatggaaagcagatttaacattcttaaaacttggtactttaccacccaaattaatttgactattaactctacttaaagctctactttgagcatttgatgccatttctgatctacaatttaatttttcaacatcaaaataatcataaccacctaaaatatatgcatcagttgtaacagttgatgcagtttgtttattattatttgttaatgcagatggtaaccaggaattatttgattgaatcattgacattggaattgatgaaacatatttttgtaattctgaatctcttgaatctttattaacaacaacatttttccaaatttgtttaatattaaaaataactctttcaagtgtatctaaaaatcttgaagtttgtctccattgtgatgatccaacaattgttatatagtcatcttttataatataaccaaatccataacctgaaggtattgaaggtgttataccaaaataatcaagtgcaggattaccacaatttgctgcaacaatttcaggtttatagattgaatctaaaattggattaaataaaaattttggaattaaatttgtttcaatttttggtattttatcattaatttcatttaaaattttagattgaataaatgctgatcttaatgaacttaaatgtctttcaaatcctagaccattacttgcatcaattgccagttgtttatgagaattaattgaagttaaaagtaatttccatttttcagaatctgttgtttgagatataaaagattgacataattttaaaatattttcattttgaatacaaattggttcagttcttgcatctctaaattttcttgttgaaacaggttcaaaagttgaaggacatttaccatataatgcataataagtaatttgtatacataactgaataaatgaatcacaaggtaattgcattttatttttaatataatttttacctaataagattttctttgaaacatattcatgttgattaattatatcagctaatcttgattcagctaaatttaaaccattcacgatttcattattataattaaatttaatatgagcaaaatctggtttaataatttcactattgattggaactgtattaatttcattccaaagagtataatttttaccattaatcattctagctaatcttaaaactgaatctgtataaacatcactaatatatcttaaaacagttgtaccatcaataattgaagcaggataaatacatgctgcagttgcatttttagtaacaactaaatttaatttatcataataacgattaatacaagtaccatattgattaccatttttatcaattttagaagtaccatgagaaacaaattgaattttttcttgattattattaatattaattgattcattatcaattgatataataaatagagcactatcaataatttccatttgttttggatttaatttttctaatgataatcttgccattttccaagtactctttgattcacttgtaaaagtacttatattaatattatttgaattatctgtctcatttttagaaacttcaatgatttttttaataattgcacataattcatgttttgagaaccaaatttgatcaatttctgataaaacagttaaagagaaaaattgaccatttgataagaaaactacatgttttgaatttttaaattttttcatttgaataccattatcttgaggtataacacaagtaccaaataaattatgataaggagacattgtataaggatcattagttgaaggatttgaatctgattttaaaataccatttttcaaagcaactataaatcttaaagttgaagtaattaagacagcggctctatattcttgagttggagagaaatttttcattggatcatcttcaagtataaagaaaggattacgaggtaaagtttgaccacgtaaatcaccataaatatttgagtttgttgagaaaatacctggagaatttaaataattaatattttttttcgacaattcaataagatgagattgtaaagtttgagaaattgaagaatttacaaaattttgagcttcatcaattaaattattataatcattttctgatattaaaggttttgtagcttctagagctttaagtaaagattgttgtaaatctggaactggcaaagttggtaaagaatcttctctttcgaaagtcaaaggcattgttgtttaaagatgggtatattaataagatttaaaaaataaatagttaaaaggcaagaaactaaatattaaataattgaatatcatttattatttataagataagataaacggaatggataaaatcaagcatgtggagaaacccttaaaatgatgaaataagggaattttaaggaataagggaaaaggggatcatctcaacaatgcggggtagatgtaggttaaggataatttaaagagaaactccgaattccgagatctttctttgattatgtaatcattattgatgtcacgtgacacttgactataatttgatatccgggtaactgtttctggaaaactaccttcctaattgggaccatcaggaaattttaaagataaccaacgtttgatccgggtaaccactttttgcatgggtacttcctaattgggccaatgaggaaggcgcgaattctctttcattgagtggtgtcgagtggttattacgcttttaggaaggtgtgacttagtaaattgctcgacttttttcaatttttcaaattttttttttcattctttaatttttcaacttaactagtacagtgatatattaatgaaatgtttctatattaaatatttgatctatctttttcagaaaatcttttaaaattatatttattagttcatattcatcaatcaaaacaatgtctgacgtcgaagaacaacaacaatttgaagaagaaattatctctgaaccagttgaagttaaatatgttgaattagcaactccaattccaaaggaaattcaaaatggtgcttcagaaattaaacttttcaacaaatggtcatttgaagatgttgttgttaaggatatttccttaactgattacattcaaatcagacaacctgttttcgttgctcatactgctggtagatatgcaactaagagatttagaaaagctcaatgtccaattattgaaagattaactaactctttaatgatgaacggtagaaataacggtaaaaaattaaaggctgttagaattatcaaacatgctatggaaattattcaagttttatccgatcaaaacccattacaagttattgttgatgctattgttaacaccggtgcaagagaagatactactagaattggttctgctggtgcagttagaagacaagctgttgatgtttctccattaagaagagttaaccaagctattgctttattaactattggtgctagagaagctgctttcagaaatatcaagactattgctgaatgtttagcagaagaattagttaacgctgcaaagggttcttcaacttcttatgctattaagaagaaggatgaattagaaagagttgctaaatctaaccgttaagttgattataatagtaatatttcatatcttaatatcattaataaattttgtgtacatgtttttttcagcttctttttttataaataaaaattaaaatttaaaagaaatgaatcacataattataaaaatacattctaatcaataaatgcaaatatctatttatctatctattgtaatttcttaatatcctctaatgcagttttaaaactatcctctggactaattttaatttttttaatctttaaaataccatcaacaaagagaaaatgtgatctagttatcttatttggaaattttttacaacctaataatgtaattaattgtaattttgtatcagcaattaaattatatggtaattcttgtttattcttaaatgaagtttgagattttgaattatctgcacttaatcctaaaactgttgcatttaatttctttaaatcatcaaattcatctctgaatcctttagcttgtcttgtacaacctgatgttgatgcttttggatatgcgaaaataactaaaatatgattatcttttgcatattttgataaattaatcttagttaaatcttgtaattcaacttcaattgattctggaatcttatcaccttcatttaattctttaatttcttcttcctcctcatcttcatcttcctcatcatcatcatcatcaattgttattttttctttatcatcctctttatcatcatcatcatcaacaacaatagcatcttccttcttagcggaacgtgatttacttttctttacaactggagtagtttttacaactggtttagtctttttaacaacttttgtaacttttttatcagcaactggtttagaaacacgagcattggaggttattttcttatcagcaatgactgataaatcttccttttgagaagcaattctagtagagcggcgtactgtcataatttattggtatgtctatttattaatttatttattgattgattgatatggaggtactcaattgaataaatagtgatataatatatatttaatatcagataataaaaatctagaatcaaatgttgtttactttaatctaaattgtatacaattaattgaccactcattaaaaattcccgtaattaattaatcaatgaggcagcgctttctcagaaaattagtgattgattgcaaatagtacaaggctcattctttatggtttatattctattctttaccagtttgattatcattgattgtttactgtattgtatttgaatacaattatagtaagtgtgtgtaggataattacttttatgtagtatctgtaattatgatataatgcaatggagtgtaatttattatatgtgttttctctattaataggagaaaaagacgttatggcggctcagctgcaaattacctcatcagaattataagagacattgcatataattaattgtatttattaccactggaatagaatataataatttgtacaaattatttgataagataagatatggtaagataagataatgatataagcagaatatgatttaatttataaataaggggagaaatagacatagacagaaaattggctgataacagtaacagacagagtgtaaacagtttaagtaaaaagtgagtgaggaataaaaggctattttattatatgctgtatatatcgatagttactatcattacaatcacaatcacaattacaattacaattacaattacaattatacaattatacaatttcatcaacatagaaatacatcgatatacttcactataccaatactaaaggaaaataaagacagagcttaattaatataagggaaaatctcgcctcccaatttcaattttaaatttaaattcaattttaataagaaaaagaaaaaggaaaaattttgaattttgaattttaatttctcagaaaaaaaagaaattccatttaatcttaataataataatctcaacagtttttggtggttttactgtaaattatacaatattattcctgtcatataatacagtcttattgctattgtcacagaatagttttatattattactctattttaattcaattctattctttaattgaactcaactcaatctatacgctcattcttcaatccccctaccaatactggatctgttaacagcgtcaattatgccggactttgctaaaaatttctttggctttgccaaacaaaagtcacctcttaccgattcaattagtaataatcaaaataatattattaacaatagtaataataatattaacaataataatcagtttaataatcaattaaataatactcaaactcatagtcataataatagtaatcaaaatatagaaattactaataatactaatactaataataataataataataatatcaatcaatatcaacaggggggcgaacaattaaaacaaatagtatctccttctgctttcccttcaaaaatattacctcatccaactccaacaattggtataaatgaaaattcttatgcaatgggtacaactataaaagatccaaatgctttgaatagatcaatgaaccaattcgatcatactcaacaaagtaatttaactgcacaactaaatatttctaataataataataataatagtagtactaatactcaaaatcaaaataatgaaaatgaaattgaaaatgatgaaaatattaatattaatattaacaacatgagtagtaaaaatataaataattcaaataccaataatcatcaacaacaacatcaacagaatttcaattcaattaataaaactcataattatgctataactaatgctgctgatacttatgataatgttcaaagaggtaaattgcgtatcaaaatcgttgaagctaatggtttaaatgtttcttcatcattctctcaaccttatgttgtttgtacttttgaatcatctgaaatcgttacaaatggtcctgaaggtatgattacaaataataatacattaatgaattctcataatcaaaatccattacaattattaccttcaaatagaaaaccatcatcaaaacatctttataatccttcaaatcctgtttggaaacatacagcaatttttgatgttatcggtgcaagttctcaattaaaaatttcaatttatgatgcagcaatcgatggttcattcttaggtcatgttaatatatcaccaaaaacaattgatgattcaagagttgaacaatggtatgatttacatcaaagattaccaaatgaacctgtaactggtaaaattaaaattaaattagaatattcaaatattcgtaaaagacattatggtccaaatgattttgaaattttaagacttttaggtaaaggtacatttggtcaagttttccaagttaaaaagaaagattcaaaaagaatttatgcaatgaaagttttatcaaaacaagttattgtcaaaaaaagagaaattgctcatacaattggtgaaagaaatattttagttagaactgcaacaactgaatcaccatttattgttggactgaaattctcttttcaaactccaacagatctttatttagttactgattttatgagtggtggtgaattattttggcatttacaaaaagaaggtagattcagtgaagaaagagctagattttatattgctgaattagtcctggcattagaacatttacataataatgatattgtttatagagatttgaaaccagaaaatattttattagatgcaaatggtcatattgcattatgtgattttggtttatcaaaggcaaatttaagtggtaatggtacaacaaatacattttgtggtacaactgaatatttagctccagaagttttattagatgaatctggatatacaaaaatggttgatttttggtcattaggtgttttagtttttgaaatgtgttgtggttggtcaccattttatgcagaaaatactcaacaaatgtataaaaatattgcatttggtaaagttagatttccaaaagaagttttatcacctcaaggtagaaattttgttaaaggattgttaaatagaaatccaaaacatagattaggtgcagttgatggtgcaatttcattaaaggaacacgtattcctttgtgatattgattggaataatttaaaagataaaaaattacctccacctttcgtacctcatattgcaaatgaattagatacttcaaattttgatcctgaatttactaatgcttcaacttctgcaattaatagacaattaataatgggttcaacacctttatcacaagctgttcaagaaaattttaaaggttttacatatgttgatgattcaacaatgtttgatcattttaatccatcaatgggaaggagaggttcatataaaccacaatatggttcctttattcctggtaatccaaatttaccacctgatgaagaagttgttgatgaacaaagtgaaattgaagaagagttagaagatgatgatgataatatggatgtcgatgatgaatttgttaatggtcaatttgatttataaaagaaatttctttgaattaaaaaaacaaacaaacttcgtttcacacactgataatataactacaatgttataatacttacaattttgctaataattactttactgacattcttacataattcatcaactatatgacttacattacaaattttaacaaattcgaattccaatctacactttttttttctccttcttcttttttattaaactattcatctactacatttattttaatattctataattttgaagtttcagtttctacaatatataactactataatacacgctaaaaaagcaccgcattaccttaaaagacggtatttaatccgttaacatgaatttgtatacttcgcattatggtagtatggagaaaattactcttcactatatgagtaatgacaactctttatatccttaactccttttaaacaaacaaacacacttaacataagatggcgacatataatgtctcatctactggatcctatatgcaagcaatggatccaatgcgagagaaacttgctagttttcatatagaaaatgaagaaaaatcatttaatttaccatcaaatttattaaatgaagataccatatctaatacaaaatctgaaatacatagaaatgtcatccaattatttaaacaatttgaaaatttagatgatgacttattattagaatatgaaaatttaaatagtgaatcaggtaatgattcaagtgataatgataatgatgaatcatatagtgatgatgaaagtacaaaattattccttattaatgaaataaaggaagaatgtagaagaattcatatgaaacatacagatggtgaagagattaatgataactatttacaattatttgaaaatattatatcaatgttaaagaatgaagaatctgatgcaggtttacaaggtcaattatttgatactttaggattcgacgaatttgatcttatttctaaattagcaacttctaaagcagaaattttaaaacaatatgatgaaatgaataagaaaaaagaaatgaaatctaaaaaaagtagtcaactgatgacagttgatcagattaaggctaaagttgctgaaaatgcaaaaagagcaagggaacagcccttagctaaggaaaaatcagtaaataattacccacatgttttcagagctcatgatgctgggaatatgctttcatttacaggtaaatcatacactttaccagcaggttctatgcgtgaatcatttgagaaatatgaagaagttataattccaaagagtgaaaagagaaattcatctgctcctaacatatttgtgccgattaaagagttagatttcctctgtcagggtacctttaaaggttataaaacattaaatagaatgcaatctttgatttatgatgttggatataatactaatgaaaatatgttagtttgtgctccaactggtgcaggtaaaacagatgttgcattattaacaattttacataccattaaacaattcatatcggaaagtgattctatagaagatgatgctgtcaatgttgatattgatctagacgaattcaagatagtgtatgttgctccattaaaagcacttgcagctgaaattgttgaaaaattctctaaaaaattagcatggttaaatattcaagttagagaattaactggtgatatgcagcttaccaaagctgaaataatgactactcagattattgttacaactccagaaaagtgggatgttgttacacgtaaatctaatggtgataccgaattagtggaaaaagttaaattattaatcattgatgaagtccatttattacatgaagatagaggtagtgttattgaaactttagttgcaagaacattaagacaagttgaaagttcacagtcaatgattagaattgttggtttatctgcaactcttccaaattttgtggatgttgcagattttttgggtgttaatagaaatgttggtatgtttttctttgatcaatcatttagacctgttccattagaacaacaattagttggggttaagggtaaagccggatctaagcaagctagagaaaatttagatgaggtatcttttacaaaattgattgaaatgatgaaagagggacaccaggttatggtttttgttcattctcgtaaagacactgttaaaactgctagaacttttatgaaaatgataagagatcaattatatgggccatattttgattgtactgattcagaaaaatatgaatattttgagagagaaatgggtaaaaataggaataaagactctagagaattatttgcaggtggttttggtattcatcatgcaggtatgggtaggtctgacagaaatatcactgaaaaaatgtttttagccggtgcaattaaggtattggtatgtactgcaactttggcttggggtgttaatttacctgcagctgctgtcattattaaaggtacacaagtttatgattcaaaacagggtggttttgttgatttaggaatttctgatgttatccaaatttttggtagagctggtagacctcaatttgaagctcatggtattggtatattatgtacaactgctgatagattagatcattatatatcattattattacaacaacatccaattgagtctaaattatctgctaaattagttgataacttaaatgcagaaatttcactcggtacagttactaatgttgaagaaggtatccaatggcttggttacacatatctttatgttagaatgaaacaaaatccatttgcttatggtattggatggcaagaagttgcggatgatccattattagttcaaagaagacgtgttatgattattgatgcagctagaaaactacataaattacaaatgattgtttttgatgaaagatcacaaggttttattccaaaagatattggtagaatttcttcagacttttacttattaaatgaatctgttgaagttttcaatcaacttattaattcaaatgctactgaagctgatgttttaagtattatctcaatgagttctgaatttgataatgttaagtttagagatgaggaagctaaagaattagaggaattacaaacagataaagttgtttgtgaaataggacccaaattagaaagttcacaaaggaaaacaaatgttttattacaatcttatatttcaaaagcttttgttaaagattcatcgctttcatcagatatggcatatattgcacaaaatgctgcacgtatttgtcgttcattattttttatgggattaaatagaagatggggtgttttcactagacatatgcttgaaatttgtaaagctgttgataagcaattatggccatttcaacatccaatgaatcaatttcaattacaaccacaaattatcagtttaattgaagctaaaaagccaacaatggatcatttaagagatttagaacctgcggaattaggtgaattagttcataatagaggaatgggaccaaaattacataaattagttggacgtttcccatatttattagttgatgttgaatgtttcccaattacaactaatgttatgagaattcatttaaatattgaacctgattttatttggaattttgattatcatggtaatgcacaatttttctggattttagttgaagatagtgataaatccaatattttacattttgaaaaatttattttgaataaaaggtcatttggatcaccacatgaacttgattttatgattccactcacagatcctgcacctccacaaattattgttagagcgattagtgattcctggttaggatcagaaacttcaggttgcagtttcatttaaacatttaattaaacctcataatgatacagttagaactaagttattaaaattacatccattacctatgactgcattacatagccatgaaattgagacaatttacacaagtaaatttaaatattttaatccaatgcaaacaatgacatttcatactttatataacacgaattcaagtgttttcgttggttcaccaactggttcaggtaaaactgttgttgcagaattagctatttggcatgcatttaatgaatttccgggatctaaaattgtttatattgcaccaatgaaagcattagttagagaaagagttgatgattggagagctagaatttgtgcaaatacaaatcataagattgttgaattaactggtgattctttacctggtattcaagaagttagagaagctgatataattattacaacacctgaaaaatttgatggtatttcacgtaattggcaaagtagaaaatttgttcaacaaatttcattagttataatggatgaaattcatttattagcaagtgatagaggtccaattctagaaatgattgttagtagaatgaattatatttcatcatttaccaaaaaacctattagattattaggattatcaacagcagtttcaaatgcgatggatatggcaagttggcttggtgttaaggaaggattgtttaatttcccacaaagtgttagacctgttccattgaagatgtatattgatggatttcctgataatttagcattttgtccattaatgaaaacaatgaataaacccgcatttatggcaattaagcaacattctccaactaaacctgttttaatttttgttgcatcaagaagacaaacaagaataactgcattagatataattcatttatgtggtatggaagataatccacgtagatttcttaaaatggatgaatatgaattatcatcacatattgataaagtaaaggatgaaacattgaaattatcactacaatttggtattggattacatcatgcaggtttagttgaaagtgatagacaaatttcacataaattatttgaacaaaataaaattcaaattttaattgcaacatcaacattagcttggggtgttaatttacctgcacatttagttattattaaaggtacacaattttttgatgcaaaaattgaaggttatagagatatggatttaacagatattttacaaatgatgggtagagctggtagaccagcatttgatacaagtggtattgcaatggttttcactaaagaatctaaaaagacattttataaacattttcttaatgttggattcccagttgaatcatcattacataaagttttagacaatcatattggtgctgaaatatcatcaggtacaattaaatcaagacaagaggcaatggattttttaacatggacatttttatatagaagagcacatcataatccaacatattatggaattgaagatatttcacaagatggtattagtaaatatttaagtggattaattgataaagttattgagaatttaattgaatccaaatgtttaatttcagcaggtgataagattgaaggtacaccatttttacaaatttcatcatattattatttatcacataaaactattagaaatttattaaataaagttacaccgaatggtagttttagacaatgtttaagatggttatgtgaagcaactgaatatgatgaattaccaactagacatggagaggaattaattcaatatggagatgtcacaagagatgagatattcagctgatgatttagaggattatgaatttatttgggatccacatattaaagcatttttattgttacaagcatatatgagtcgagttgaattaccaattgcagattattcacaagatacaatatcagttttagatcaaagtttacgtattttacaagcatatattgatgcaacatcagagatgagatttttatcaacaacaattaattttattaaagttatgcaatgtattaaacaaggatgttggtttgatgatgattttgtttatacattacctggattaaaaatcaagaaatgtgataatgttaacgaaatttatgatttagatggtagtgaatggaatccagttatttccaataatgataagattacattgaaaagtattggtaaaatcaaaaagaggaatgaatataataaaataatggataaattaagagtttcaaagaataagagggaagaatttattaaagttgcaagtacattgtcaacaggtaaatttttaattaatcaacaggttaataataaagaaattgaagttgaattaattcatgaaaatccaatgtatcgtaaagattttaagatttatgcaccgaaattttctaaaccacagagagagacatggtttgtcattatttgtaatttatcaaaggatgaattatatgcaataaagagagaatcaccaagaagttatggtaataaaattgataaagttaattgtaagattaatatcattgaagatataagaggtgaagaagttgatattataatgattagtgattttactgatatttattatcatagtagattcaatttaatgaagtagggagatatttagggtgtatgacatgatttaatgttgtggttggtatattttatactactattaaagagttttatggagttttattatagttatcatgggtgtttgtatgtgaatcattggtaataaatgctttattgggagtatcctgtgtataaactttatttaaagagcattaacgtatagttaattgtataaatagttagataacgagcctccaagaaagtgaaaaatgggtattttagagaatatccatgtgaagttatgaatacaagttagttaatatccagtagtatatattatataggagagataagttacttacattaatattattataagatgtattgcaagtatacgatgataatgatcaaaaccgttataatcgattaacatgtggctaagtaaagttgacattgcgggaaatgaggaattaaattactttaattggattccgtttaagtgttgatatatagtttcttgtttcttttgtagacaatgaattctgcctgtaatagggtttgataggtaggaaagagggatagtaggtatatacagcaaaatgtctgatgaaccattagttaataataatgacaataatgataataatgatattaacggtaataatattaatgataacgtaccatttgatgaaactgttaatataatttattgttgtttaagtattaattcaacaacaatttattcatatgataataataataataatatgaataagaatgatgttaattatgttgaaataatttcacaaaaattaggtgaaattaatgaaattcaagagaatagaattgatcatataaatttatctaaaaatttacgtataaataataaagatattaatttagaaatttattataagaagatattaatggagaatagtgatttaattacaattgttatattatgtagtaataaattattaagtagttttgttaataatttattagaaaaattatcaaatgaatatattaatgaatattataattttaataaaaggtttgaatttaagataaggttaaaagaaattataattcaagaagagggtaaattaattcaattagttcaaaattatggatcagttgaagatgaaatttctcaagttagagaaataatgaatgataatattgataaaattttaattagaggtgataatttagattcattaattaataaaacatcaaatttaaatacaaattcaaattcttttagaagaagaactataaagattaaaaggaatatgatgtttgaaaatatgaaattacttataattataattattataataataattgttttatcagttatatttataggagctaaatggtattagtatttattgtatattattgtatataattaaaattaaacaacatcaatgtcaacatcaacatcaatatcgacatcttctgtatcattattatgtatttcattatcaggatcttgtccttctaattccttttgttctaattcaaattgtgatacttttgtattagtatcatcgttttcttctatatcttcatctatatcctcttcatcttcatcatcttcctctatatcttcctctatttcttcatcctcattatcctcttcaccatcctcatcatcatcatcatcatcattattattcactatcactgcattttcatctaatttaactctctttaaagattcttcattactattattattatcattatcatcatcaatttcatcatcaatttccttattattaccaccattattattatttaattcctttgcccttgccttctccatttttttagcttctttacgtttattaaatgcatctaattcattatctaataaaaatttaaaatttgaaaatccaacaattgataaagcattaattatatcatctgcattaacaattttcctattatttgccttaactaattgctttgcatgatgataaataaaatttataaataaaatacttgctctttgaataattatttgagtatcctttgctaataaatatttttcaccatcatttgaattaattactgatttacaaattttcgttataattgattttgggaatacaaaattatcaatacttaaattttcattgagtaatatagtatctaaattagattcttgttcatcctttctccaaccctttgctggcatcactgtttacttgactgaaaacggagataaaaaaaggaaatctacacgttgttgatattattacttaaatgtattcataatcactatgatacgcggtattatgtattatctactattaacaccggttatatccctacttataaatactaatatcaaacactataaacactacggatataccacagcatataattatactaccatacaatacaatacaaaccagtccttaccctttaggagataaagagataaagcatttataatccggacatacagaattctcctatttccatgaaaaattttccctttaaatccgtgtattttctttcatattacaaatacaataattacaaatactttttgatatctatctggtcaaatggtatataaaccatgatgtatccacttgtaacccttttctattccctatttccttcttttattatcctcatctaatcttatcttatcttaacttaacttatcaaacaatgtttaaccttatgaaaaatacaaacttcaatctttttaaaaataaaaagataacaccaaaatcaactaactccgaatcaattcaagaaactatatctaataatgaatttctaataccacaaaattataataattataataaatcaaatatatcaaataaattacctgatggttgggaattagaatatgataatatactttgtcaattttattatattaataaaattaataatataattcaatttgattcaccattagaggaattaaaatattcaacttagagagaagataagttaatatccttagtatattcaactaaccattcatattcatcattatttaaataatctttcattatatttctaatcttttcatgataattattaatccaattaatttgttcatttgataaatatttaatatcaattaattcattacaaaatggtactaatgtggtatattcaaaatttaaaattttattaatttcatcaaaccattgaactaaaatatcactttcaattctaataccaaattcattttcaagataatatccaggttcaatactaataaatgatccattatttaataatttataattatatgaagttttatttggtgctaaacctgcaggtcctgaatgaacacaaataaaattatcaattccatgtcctgtaccatgtccatatgtcatattaaatttttttaaatcttttcttgcaattgaatcaatactttcatttgatgtaccatatttaaattttaattttgatacattaatatgacctgataaaactaatgaatatgctaatttaattttatcattaggtgaagtattatctgtggttataaatatacttctagttatatctgttgtaccattaaggtattgacctccaatatctaataataaaatattattatcttttattttacaatttgataaaattgttggttcataatgaacaattgcactatttaaaccagttgcaataattgatttaaaacttggacctctataattttcatttttataacgtaaattttctaattttgaaacaatatctaattctgttaatgatgtaatttttgtattttcacaattagaataaatccaataaaataattttataattgcaattgaatcaaataattgagatttccttaaattttgtatctctatggaatttttaataccttttaattcagttaataatgaacgaaattttatattataaattgaaggacatgaattaaaaattgctgaagttgtatttaaatcaagtaaaatattattattttcaatattatttgattttaatgcaggtaaatcatcccaaatttgattataatttttaaccatgatattattttcttcaaggtatgttaggatattggtaattttccttttatcaatatatagggtaatttcattatgagttataataatataagagaagaaaacaggattatattctatatcattaccacgtaaatttaataaccaagcaattgaatcaagtgaacctgaaatatatgaatgaattttgtctttaagcatttcatttctaattattgataatttatcaactatgggaacaccagaatattttaaatcatagataaataattgattaattggtatattaattttcggtttaattttatcaattaaattataatctaaatcttgtacaaaggttaaattattttcgtagcaaattgattttaatttaattgataaatcataggtaattaaagttggatcaactgcaatgaaaggaggagaatctttattatgatgattaatacaattaattgtttcattaatcatccaatcaatccaattttcatcaataccttgttttaaaagtataaaatcatttttatttaattgtttttcagcttgaataaaatatcttgaatcagttgataaagcagctgaataaagtgttataatggcaattcctgaagaacctgtaaaattagttataaattgtcttctttgatgttgaattgcggtatattcactttgatgagaatcctctgaagggattatataagttgttatattatttaatttcattaaatgacgtagttttgaaagtgaatcagtgttgaatataattttcttttcatatttatcaatataattatcattatcataatcattaataattggggtataactgttacaattaaacagcatattaaaatagtataaacaagataacataaaagtatatatatatatatataatagacttagataattactcactcttgtttattttgaattgttgaatggatatcagaaacaggagtagtaggagggttagcattagcatgaacattatccaaaccatgaacatcaaagaaatttctacgaacttcaacgtaatcataagcgaattcaccaatttgatcttcatccatacctaattcttcaccaatttcatcaactcttaaattacaataaggtaatttattaataatgaaacaaagtaaggcagttacaaccattgaataaccaataactgcaccaatataagcaatttgtttatataattgtttccaattttgattcatccaaccacctggatgaattgtataaccatcataacctaaaatataatcagttgcaaataaaccattgaaaaaaagtccaattacacctgcaataccatgttctgccaatacatctaatgaatcatcaactttaaaccaaattttaataattgtagcaaaattacaagtaaatcctgatacaatacctaaaattattgaagaccataaaggtatacaccccgatgttggagttgcagcaactaaacctgaaattataccagaacataaaccaacagttgaccaatgattagttctataaaaatccaataaaacccaagtaaaaccagcaaatgcggcacataaattagtattcataattgcataaactgattttaaagagggggaaagacaagttaaaccattaaaacctaaccaaccaaaccataataacattgtaccaattgtaaccattgaaacattatgaggtctaaaattaatcattaaatgttctcttctctgtccgaggaaataagaaataacgaaacctgaaaaaccagataaaatttccacaggaccaccacctgcataatctaagaccccccatttataagcccaaccatttgaattccaaatccaacaagtaacaggacaataaacaagggttaaccaaaggaaagtgaaaggaatgaagggtaaaattctacctctttcacatatagccccaatatagatacaagcagttattgaagcaaacataccttgaaaattagcataagccatttcaggtattataattgaatcattaatgacagtataaggattatctaaattttgataagcaaaattatgtaaattaccaataaatttattagttgccgtagatgaaaatgcaagtgaatacccccaaaaataccaatggaaaatagatataagtaaaataaagaaaactgaaaaaatcatatgtaaagcagatttcctcctagctaaacctgaataaagataagctaaaccgaaacacatgataagaacaagagcggttccaataacggttgctaatactgttgcatagttataagtattagcccaaacgtgaacaacagtcattgtctaaaagaaagatatgatatgatataatctacaattaaagggtctataagatgattgacataataatctgtcaataattaaataaataaataaagtttagtaaataaatagaaaaattttaatattaatatatattaatataataaatgattacataatcaccattacgtaataacagataagaatagttatctcctattggatatagtatataatgcctcttattattacaatacatcactttcaataccaccgaatgaactgtattcagctgctattgctgatattgtccactgttctgcctctctcaactgtgctattactttaccaactatttcaactcctcgtaatgaatgtattagtgtaggtcctgcttctctctctcccccttcttctcttattaatctcactccttcacttatacttactatataaaatttaatcccctcctttaaacaccattccctccatttaattgtctcatctgtatatttcttctctttactatctttactactatctattacaaatataactctattcaactttaatgatttaataaaacttaaatttctatcctgtggatgtccactcctatataactctttttcaacacatgcaaaattcagtggtggtacatatcttggtgtgtattccatttcgtttagtatactctcttacttatataagaaaaacacgcactgtatacttaaggattattattattattataattttcaaatttcttattttattcaccataccactgtttattttattttattttattttatttttatgtcttttatgtcttttatcatattatcatactctcatctcatccatgcgattgttaatatatttctacctattaattacaacctcacttgctcaattatatcaaaaaggtgataaagtagaattaattgttaatactgcaacttctcctaaaaatcatcctctatcttattatcatttacctttcgtttgtcctgcttcttcaaatgtttcaccaattcatatgtccttacctcaaatcttaactggtaatactctttatcaatcagattattccctaaattttaaaattgatcaaccttgtttacgtctttgtgatagaattatgaatcaacgtaatattaaaagatcaatctctttaattaatgataattatatagctaattggtttattgatgatttacccggtgcaactactttcattaaagatagtgttattgatgatattgttaaaaaatattatgttaaaggtttccctctaggttttattaataaaaatggtgaaacttttattaataatcatttaatgatggttatacgttatcatcatgaattcgataataattattcaatcgttggtttcgaaatttatccaaaatcagttagtgatgcaagttgtcctggtgcttctaaaaattatcaaaatttaaaattagatccaaatgattcaaataaattaattccttatacttattcaatttattggagagaagataatcaaattaattaccaaaatcgttggaaattatatatagattcctctcaaattgatgaaaatggtaaaattttaaataaaaatccttcttcaacaattcattgggtttctctaattaattcattcgttatattcttcttcctttcaattgtcttggcatttattatcattatcacttttagaagctcatcttcatcatcatcacaaaacactccaacttcccttcatgacctagcttccgcttctttcaataaacctttcatctctcccctattatcaatcctcactggtgcaggtattcaattattcttctcattattcctattcacattaattgcaatcttcccttttaaaaatatcctctcaatttcttcaaatgatttgaaaatcctttatcctataatctttttaatcatcatttcaggtttctttgcaggttttacatcaattcaattatacaaattatttaataattcacctaatgtttcatttaaattaacttgtttaatgtcttcattatcttcttcattaccaatttcaatccctttaatcatcatcttaatagttaatcatactattttcaagaaaaattcaccaaattcattagaattctcaacttttatttacactttctcaatttattgtattgttcaaataccaattgcaattattggtggtttagtttcttcaaaattaaatattttttacaatatcttatctaaaaagaaatcaaaggaaatttcatcatcatcatcatcatcatcatataatacttcacctactcgcaagccaatttacctttatttcccatttagttttataataattggtattttcccatcatcaattattttcattgaatcaaaattcatttattcaactttattatcattaaataattcaaatataattgcaggttttatcattatttcttcaatacttttatcattaattatgtttgaaattggtataattgcaacttatcttaaattaaagaacaacctaattaaaaattggcaatggtggatattcttaaattcttcattttcaatttggtgtttccttaattatacttcattatacaatttattctttgttaataaaattattaaatcagattcaacagttctttatattacttatacaacaattattaatactttaatatcaattacttgtggttcaatttcacttgttggtgcaactttctttatttatttaattgtttgtaatagttcaaataaacatgattaatggacaaaattatataacctcattttatataacttctatttaaattataaatttccctacaaagaacataccattcaacttcccttttattaaaattttcttcccatttatttaattcatacattaattttaaatttggttgaattataacatttaaccttctaactctaacaaataaatatgctcggcaaatacttaaatttaaccttttcataacttcacaaatacaaactgttgcacttctactaactccaacttgacaatgaactaatattttactatctttttcataacattcattaattaattctaatgaattttttaatgataatgtaattgttgacataccatcatcacttaattcattaataattaataattttttaatatttaaattcttatcattaaattcatattcaatattaccattatccttaatatttttattatatttaaatttttcaatccaattaacattctctccaacactaacaatatattcaatacctaatttatttaacataattaaactctcggcatgatttaatgatcctaaatataaatgttttaaaattcttgatggtaatgaacctgaaacttcttcaaatatactctttgatgtctccattattttggtattattaactttaacggaattaccgctaaacattgatgatttaccaaatgtattacctaccgcatttttattattattattattattattattattattattattaccacgtaattgaacaatatgatgccccgttggtgttataaatgatgattgattattacccccaactgtaccaatatttttaccttttggcattaataataataatgaacgtaacattctcttatcctcttcaaatttaaatgattctctagtctctatttcatcatcatcatttttatttaatggtgaaaatttattcattataatttctaatttttgtaataataaataatctgttttaaaaatgaaaaatggtctaccataatctttatgtaattttaaaatactttcatctaatgaaattttctctgaatacattaaataacataatattaaaagtgatgattcagtatatccatctgaacaataaattaaacatgggaaattatcatcacaaatataataacaaaatttacaaatattaataattgataaaatttcatcatctgacatatcagccattgttaatgatcctgatggtgggaattcaatattaatataatcacattccaaataattttcataaataattcttaattgtttcaatgttgggattcttgattcttcaatacatttgatatacattctccaaattttctttggtttagttattaataattcatcaagtttattggaatctccattacattctcgaaaatcatttttccgtaatctaacaattgtgttatcttcattacaataaattggacatttttgttgattatttaacatgtttccaacttcttcatcactaattatatctctaatattttgattatttaattgaatttgtaaacattcataatcagttatatttccaatccaaatagatcctttaattggagtagctgttgacattttacttatctcgagtctttccctatataggtaatttgaatcccaattattgaaaacattaatatcataattggaacataattcattttgtatcttatttgatgaattttcacttaatataggtatacaaattacattagattcatctaatttattaatatcattctctcttaatataaatgtattatattttttatcattaagtaatttcatgttggtatatggtttaagaatttccttatgttgatactgatatgctaattgtgcaatgtgtagtaatcttgataaactaacacatttacatttattatttatgaaaaaatctttatcttcaatatccatattaaatttatgatcctctttattaaaacaataaactatgaaatctgagacatgacttattttacttacttgaatatgaaaatttcttaaattaattccaacaactggatcaacatctctgaaaacaggtattaaatgtgttataatacaatctgttatgattgtttcaatatgatattgttcaaatacaattcttggtaaatttttttgtaaatatccttctaaattaattatacttgaatatggaattaatatatcttcaggaataatactaccacgtatgaatccacatgattcagtaattatattggtaaattctgatgaagcctctccattagaattacatgatcgaataggtataagaaaccttacatctggtgtttgcattaatttattaacatcatcatcatcctcttcttcaattgttccttcttctccttctgtattaattttttcatccagatcatctaatgggtttatattgttagagctagctggtttttcaaattttataattttaggtttatcattagttggatataatgtgttacttaaaaaacttatttgtccataattatgtttatgaataccatgtaaccaggggaaaactttttcaacttcaggtaatttcctattatatgtttgatttaagtaatttataacttcatcaatacttaataatttacaataaattaatgatggtaatgatttatgattaataaaattatcaaattgattaataaaggggttaaattctaatttatttggtgaatttaatttaattcttgactttaaatttaaacatttcatcattttcattagatgaactcattgcacgttttgaactccttcgttgttcaatttttcttggggtattagaaagttcaaattcatcagataaatcatcattaatttcattatcttctaaaaatgtttcctcacaaataatttccttttgtaaacttgttggtggtttctcatacactgatgatgtacttgaacttaatgatgttgatacactctgtagtttatttggtgttgataattcaactattatcctatcttcaatggttgattcttcattttcttcatcaattattatctcttcagatatatttatcattggtattgttccattagttacattagttacattattatcattccatgttttaggaacagccatactaacatcactattatcattgcttttatttttattgtttccatttccatttccattttcgtggctcatttttggtgttgtatctaattctattggataggtatcaattgttaaatcagacatacgttctagcttttgttatttgaatataatgttgatcttaacctgtctaacctttacgtataggatgagatgcaagaggaaaggagaatagaatcaaacaaaagtaaaggagttaaaacaaccacaataaaatataatctcaaacttgcaaatataaaaaacagagataaccaatttgcatgttttaaattttttaattacctgatgcgggcatttcttgcattctattttactttaatgttactttaatgtttcttttattttatttttattttattaacttttattttatttttaatctatacaggttctttttatattatatattattcactattggaagttctctattaatgttaacaaatgtttcataaactgtctatctgtagatgatacaagtgtttgaacaagttctgttgaaagttgtgcagggaatccaacatttgaaactaaaacttcattgatcatattacatgtagtttcattaaatccttgtggtaatccattctttgtatttagcacagctgttgatgcagtatttgtactgttgttttctatttttttcttttgtaatgtattagcatcaggatattcatatccaatatgtgcaataccttttaataatctacaagtctctaaaacgacattgtttcgaaattgtgcatcttttagtaaatttttatttgatcctggtactttaattgataattcaatacttaataaaatacaattattaattaaaatttcattaacttgttcaaatttattattatcatttttaaatgaatctaattgatcaagtacaataccactaccaattccttgacataacatatttaaaattatgattgataatttcacaatacttaaatcatttgattgatattcaaatgcaatatttaatgttaatttaattatattaattaacatttccttattttcattattaactaaccaaattgaatttaaatgatcatttgaaactgcaattataattgataatactgctttctctaagtctaatacttcacgtttactaaagtcatcactaacagttgccttatcattttcaattttaatgaaaattttatttaataatggtgataataatgatgataataatgaataagagtttggattattggttgattgatgtaaaatttgtgaaataaaattgataaaattaacaacttctaaacttttcaatttatcaaaattaatcataatacatgaaataaatttggataaaatattttctaatagttctttgatactattgttattgttgttgttactatttaataaaatgtataatctaacaacacaaaattgaatacattctctaattatattaaaattaattaaactttctaatgtaatgaaaataacttgtgatatttgatttaataaattaaggaaattattattattaaaagtttcacttcttaaattttcaaatcctttgagaatattacccattgaaattagtgaatgatgaacttgaattaaaactttaattgttaattgagaattattaactaatgtaataccattttctaaatttgaaaataatggttgtaaaacattttcaaatatattaattttattattatcatctgaaattaatgtaattaatataccaacactctcaaataaatataattgactctcaaatgaaccattttcttcaattaatgttaaatctaaatcatataatgattcaattgaattagaatttgttgatttacttatatttttatttgatgtaatatcaaaatttaatgttaataatggtaataatgatttaattaattcttgaataatataatcgttgattttcggtttagtcattttgataaatctatataataagtaccatgatctatatttaactttttcattatcactgaaaacaccaaaatttgaaataaaaatatttaaaactttcattaaaatatcttccttattaacattttctacttgaatattattattattgaaaaatgtataatgttttgaaagtaattcaaaaaataatagttgaattaatggatgactaattaaaatttgatttgaattattaataattttacataacatttcattgaaaacaaaataaggtcttgaattattaatcattgtctttggtaaattcataacattatttcttaacatgtcactataataagttaaaacataaagtcctaattcgattgttctccaatctgatattgatgatgatgaatcatttgatgatgaaatatttgagaataaaaattcattaatacaattaattaaaacttctaatgctaatgattcatttaataaaacgattgaatctaagaaaacacttaacttatttctaatatcattaaattgttcaattgtttcatcatcatcaccatcatcttcttcatcgaattttaatttcagtataatatttttagataaatttttcaagatttcatcattattaattatggataaatcaatttctgaagttatatttttctttaataataataagaaatttgaaatgaaggagaaaacttcaattgatatatcatcaaattcatttgataaaaattcaaatattaaagggaaaatttctaaaatttttgaacaagctaaatttttaaattcattatttaataattcttcctttgaagaattttcaagtacgatgattaattcatcaccaatttgattaactaattttgctaatgacattgaaacatcaaaacctaaaacatttgaattgatattcatttgaactaaaattgaacctaaatttaaaaaattaattaattctaattttttagttggtgacattttcttatgtaaaatatcattaaaagtatttgcagttacaactttcctctttgaagtaccattttcatttgaacttaaaaattgataaaggaatgacatatattgatcatctaatattaaattaatttcgatccatgaaacataagaaccaatacatacaactgtattattaataatttcatcagataattgtttatttgaaatattattaggatttgtaaaattaattaaaatttttttccaaatagttgttaaatcaatcatatcatttgctctaattgaatctttaagtaaattattatgttcttgagattcattatttctagtaattaattgatcaccaatttcttgatgaataactaaaacagttctaatataataatcagttgcaatttcattaaaagaatcatttgatgaattatatgataaagataataaatcttttaataaagttgaataacaagttaaagtacaatgaacgaatattaaacctaaagttttagataaagcatttcttaagaaaaattgttcaattttatttgatgaaattaaattatttaaataattaaatacaatatctttaatttgaattttttcattatctgataaataaggtaatctttcattaataacttgtaaagaaaagaatttaccattaattgtagttgaatctgattgtaataattttaaacaaggttgccatccatcatttgaagttttaatttgtgtaataaaagataaagcttgatctttaagagatgattcacttgaaggattgtttgcaatttccactgcttgttcaatttgtgcttccattataatatatatggtatggtataatataggatataaaaataataatagttaaatacttttatattattttatcgatatatatagatgatacactgaaaaatttaaagccttgtccttttttgttaagaaaaattgatgattagatataataagatatgtgtggaaagcaaaaagtgaaaggttgtgtaacagagaagaagattaagatctactacttaatgtatctatttataaagatgtaggtttgtacagataaaagaatcaaaaaaatcaaaaaaagatacaaaatgcaaaatgcataatgaaaaatttcaacacattcctaaaacaaaaccattaatgaaaataaaatcgcccttcaaaaaaattggttataggaaggggaagtatttgatttgatctatctgtcatattaactatttaaaaaaataatgctattttgtaaggtcgtacccggattcgaactggggttgcccggatcaaaaccgagagtgataaccactacactatacaaccttttacgttttgtctgttttgatgctttttcacattgttgtttagtgaaataaacccccgcccaacacccgttaataatggatttttcaacaatccaagagtatatggagtaatgttgaatgatattttgtttattgaaatagtgaaattataaaaaattaaaagaaaaaaaagttttttcttgattaataaaattataataatgtttaaagattttacaattttttaatttctaacttcaacactagttttgaaataaattttttattatgtttgctaaaaattagtcaataaatcttcaaaacaccgaataatataagtatcaaactgatataaaaaagttaattattactactccataaaagttcaaattgaaaaacgatgtttgaccatattctcgatttttcattatttcttcacatgcaatgtgtccaataatttcataaatgccacactaacttttttacttcattatcattaaataatgcccagcttgaaatcattcttctcatcatcatcatcagcatcatctacaccaacagctaaacctattacagaaaagaaaactgtcaaagaaattccagtttcaaaaaaagaatcttcaaaaatgggttgtaaatgtcgttctaaaaagtccgaaccagttaatgaaatatccgtaaaggaagattcatgttgttgttctaaacaaacagcatgaatcatcatcatcatgttgtggatcagaaaattaaagaatcagattctgatgataataatgattcattagtcatttcttcacatcctgaacatcctgcaaatttaatctgtgaattttgtaaattattttacaataatggttgggttacaggtacaggtggtggtatatcagttaaaaaggatgataatatttatttagcaccaagtggagttcaaaaggaacgtatgttaccaacaaatatatttgttatgtcaatgaattcaaaggaatatattagaaaacctttaaatttaaaaccttcagcttgtacaccattatttatggcagcttatacaatgagaaatgcaggtgcttgtattcatactcactcacaaaatgctgttatgtgtactttattatttgataaagttttcgaaatttcttcaattgaacaaattaaagcattacctaaaattactgaacctggtaatatgtggtattctgataaattaattattccaattattgaaaatactgaaagagaggaagaattagaaacttctttaagaaaggcaattgaagaatatccttctgcaactgctgttttagttagaagacatggtatctatgtttggggtgaaactgtttggaaggctaaaatttataatgaagcaatcgattatttacttgaattagcagttaaaatgaaacaaatgggtattccaacttttaaagaaaattaaaatatagtttaacaaatgtctaatgtacaaaaaatttatttatatagcttttagaatagatttaagttcttatttaatcttgaatgaacgttttgtagttttcaaattagttgcaaaaattttattatattcaacagatttctctaaatcttcatcaatcattccaacactaacaatatcatcacctctaattaaaatacctgaagtattcttccttatagttggtttatccattgaaaaaattaattcttcagattttgtaagtacaatattcatattttgatcataaccttctaataatccaatgaaaagacgtccatctgatgtcaatactttaaccctatctccaagatactctttgagcccagacattggacaatcaaagctcactcgatgctataataatatatttgagatgatgaagaaatgcaagaaataagaccttgtggaatactatcaaaaataatttcactttacaaaagtattacgtaaatagtttagaaggctcagatctttagtgtaatacatgcacactgtttgctttgctcttcattcatttcacaatgagttgtccatctaccgatctatccagtgagatagatgtaacagctgttgatgtcgatgcttatgacaaacaggaattaattgtttgggcaagtaagttagaacttgaaactatagattttaaatcttccagtagagaattaattgatagattaacgacaatgtcaactaatctagctaaatctttaaatgatacaaagaaatatatttttgatcttaaaataagtacctctaatagagatgcacatgtagaaaatatgataaatatgcaaataaatgatgaattggaaacaatttatagtaaattatccaatgcaaatgaaaagatcaaatcattacaggataccatatatgaagttgaaataaatacaactaatgaaatacatgaaaagctccagattcatgtaaagcaacagaagaaaaaaaatgaatatttggaaaaacgaattgaggaactgtcaaatgttattgaatcattggtaagtaatcaaaggaaagagaatgggaatagagtaaacaaatcaaatgatgaacgagaagaaagtaggaaccagaatcagtttatgttattaccaacacaaagtcgtttatcaacaacaagtcatctatcccaaagtagttcacagacaagttttttaccaacaggtcatttaccaacaccaacacaagattcatcaaataatagcatagaagttgatacaggaactaaagttcaaagatctaagtcaacaccagtaaaaaaacgcaagaaaacacccagaagaaaacggcttactagaactaaatccaaaaagcattcagtaccagaattatcacaagatcaaacatatgttgaaagatcaatcactagaagacttatataatgttaaataatttacattactcaaatttcttgcaatatcaatgtttaattcaagtgttttaatatttgattgaatattagttaatgtatcataatataaataataaaccggcatatatctatcaacaaatttttcaacttcattatcattcatacccattccttttaatttaattcaattcatgctcttgttgaattctccaattataaacattattaatatcatctgttttaatacatacgaataaatcgaaaagttgccaaataatttcatattgctttaaattatcatttatttgaatagtatgatcatctttcacattatcaaatctacctaaataaatttgtttaattagattccattttactaatacttctttattattattaattgaacaataaccattaaaccaaccttcaaaaattatcaaatcaacttttttatcaacaattgtccatttatcaatatttgatctatcacctttaccattgtatgctgatttatcatagcatggaatacttattggtaatttactttcatcatttgctaacaattgattgaaaatattacttaataataataaatcatgtgtaccaggtaatcctctaccctgtaacaatggattatcattattttgtttagaaacttctaattgttgttcatatgtcagataaaaatcatccattgaaaattgtataatattagcattgggaaatgtattctctaatgattctttaatttttgaagcagctgtagttttacctgaaccttgaggaccttcaattccaacgactaatggtttttgggttcccccttttatttgattatcaagtaagggtgatattaattcaatggcactttcaacaactgtagatttgttcatttgatatctatatttgttgataaaaagaaaatgctggtaaagaaaagcagtgtaggggtgaagtaaacttttcacatcatgaaatgttattttattaggaaatgttgaagtaatggttgatttaatacaagttccataaagtcttacgaacctgttaataggagatatacatcgcgttttaaccattaatatgatgtatatgatgatttcctttctactactactagatgatgatcataaaaagtttcttttagtagagtaaataaataaataattaagatttatacatgcataaagtaaaagatataatatattaatataacaacaattaagcttgtttttcaagttcctttaattttgaaattaattcatcaacattcttaaccattacaccagcttttctagttggtggtacatctaatgaaattgtttctaatctatcattaatttcaacatttaaatcttcaggttttaaaacacctaatggtttcttctttgctttcatcatcattggtaatttaataaattttggttcatttaatcttaaatcagttgtaataacaattggtaatggagcttcaataacttctacaccaccatcaatttctctttcaactttaattaaattatcattttcaattataatttttgcagcatttgttgcttgtgaccaacctaataaacctgctaacatttgaccaacttgatttgaatcatcatcaattgcttgtttacctaaaataacaaaatttgaaccttccttttcaacaatttttttcaatattttagaaactgctaatggttcaatttgtttatcttcattaatttcaattaatgttgaagtatctgcacctcttgcaagtgcagttcttaaaacttcctttgccttagttgatccaatagtaactgcatgaatagattcaactaaacctttattattttttctaattttacatgcttcctcaactgcaatatcatcaaatggattaatactaaatttaacaccttgagattcaataccagttttagttttatttattcttggtttaagagcagcatctataactcttttaacaggaaccaatatcttaatcttactagacataatgaatgtgatatttttgtcaattaattaaatattctacaaaagtaaaatcctacaaatattctaaaatgactcttctataaattaaatgattcactctctattaaagaaatttcaaattttcacccagttgaaaaactgcgaaaactccgtctgattacgtaataatgtttatagtatttatattgacgcgtcttaatcagttaatgaatcattagctcttgatctggccttcattctttgaatcttggccttaagatcattaggttatagctgtagccttgatccatccttcatcattatcatcaaaattataaatagaactgttggtgatattaagtaatttaggttgtgtttctgatattttacttcctctttctcgtggttctccagttgttgaatcaatacttaaaattgatatccttctattaatatctgttgattcatccatacttatatcaacattagtattaatatccatattcttattcgctatgttactattattattactattattacttattggcattggatcaatatctttaccattaattaacttattcgtttcaagttgattctctaacattcgaactttttgttgtaattgaatattctttgatcttgcattctcaatatcactatctaatcttaatatttgtgtttcctttgattttaaagttaaattcattgtagtaaatttattatgataatcatccagtttattatttaatgaattattagttttcattaattcttcattagtacgtcttaattcattaatttcattctccatttcaattttcattaaattccaattattcctctcaatttttaatgattcaaactcttgtaattgttgtgtcgataaattatagttattaatattcgatgcctttaatgattttgatgtaagtggatttttactatttggtacattatccttaactggtgaagttgctaaacgttttgaaggtatagattgtttagtattgatgttaaaattattattcatattttgtgaaagtgaaggtgttgtatttctagaaatttcattgtttctaattggttttttagtttctctctctatattattaacattattattattatcatttattgattgatttttaattttaacaactgcattattacaaatttgttcaattttctttatatgacgtttatcaattttttcaatatatttctttgatgtatcatttccaataactttcattaatgtaccaattacttcagatgcactatttctaacaggtaactgtgaatctaatacaagtttcagagctgttgtcattatttgttcaacatcaattggattaggtggttttgtcaattcttttaaacatcgtacaagatattgcattgtttcaactttaactaatggtgatatatgtttcatatgttcaacaattggttcaacaagttcatgaaatgaacctaattggaaacataatgttaaaatattaattaatgaatctaaaactgattttttcttttccttcgttctttcaagtaaaggagttattattgttgatatgtatttagaaaaatttgtttttaaaccttttgctaaatcagttaatatatcagctgataatgtaactacttgtaaattaacatcttttaaacatccaaccattaatgatatgaaatatgaataatcatcattttgaattttatttactttaaataatggtgatatctcttttaatatttcaactctttctttccaaacaggatcacttaatctcttcatttaaatttgatggtaatttattcaatacatcaataggatcttcaaattcatatggatcaaatacgggttgtgaatcatcaactttaatatcaaccatttcaatatcaatatcatttattgggacactattattaacttgattattttgtgactctctttccttaattttaatttgttcaaccagtaaaagtctattaggtttagtacctggttgaattttattaaataaagctgttaaatctttttgttgaattggttttaattttgagaaaatcacattatctaatgattcaccaatataagatcttaaggtaacacataaatttgttgcttcacttctaacatttttatctgagtgagcaaacattttaggtatattatcaataattaattttggattaattgcaacacaaccaaattctttgaaaatttcattaattactttaattgctgcaattattggtttaggagatttagcagttaatgaaggtattattaattctaaaatatcagatggactatcaacttcaacaaataataggattaattcagttgaagatattttggtattagccttatttgatgtaagacctttctcaacaagtattggtattaaagaatttcttaaatttgtacaatatttagtattatttggaattgaaatatttttcaatattgtaaataaagtcgatataccagtttcctgtgaagctaaatttgaatctgatgctatttttttaataatttcagtatcattaagtaaattaattattgaacttatcatttatatttgaatctgctaagttgttttaattgattataacctaattgacgagccttccaagatttatgaattataagttcatccaggggtaaagatgtaaaatcagattctccatcatcagccatattgtgtgtgatagtgctaaagtcgtatcttaccagtaaataccgttacaccaatacacaacttccaacaaagaaaccttgatcccagatgcacaatttcaacttcaatttcaaaaccgtaaacaaaaacaaaacaaagcaaaaacaagcaaaaactcattacgtaagtaaatccagactttgacatgaaaattataaatgataagcccaggtaatgaaaagtttctccggagatgacaaattgttaagcttttcactatttactatataaagagacgactttcttttctaatatttattatttattatttgtattataattatattttatactcaattaaataaacaaaaaacaatattatcaaaaagacttatcatgtcattacaaactagaaattacggtaaaatagaatttgtcccattatccgatataatacgaccaattatgccagttttagataacgaaaaaatagatacaatggttaaaacacttgaaggagtaccaacaccttctaaaacttgtcaaattcaagatatcgtttcaggtgaattacctccaattgatgtattatgtgtctctcaaaatggtgttaaaaagtattttgctttcggtggttgtcatagatttcaagcttatgatagagcaggtgtaccaatggttaaatgtaaagttttaccaagtactaaaagtcaattaaaactttatttaggtagttctgttgattctttctttgattaaattcttatataatatagatattagaaatgcaatgtacttttaattttattattatgattatttatccctgctttcaatatataatttataaaaccctttttttacaacttaatttatgtctcttaaatttgatttcacaatcaaaacttttcatacaataatcacatttatattccctaaaatgaattttcatatgtttatttaaatttgatgattcattaaatcttttaccacaaattttacaaatcattggtttatcaccactatgaattcttaaatgaattgttaaacttgatgatgttttaaatgttttaccacaaatatcacatttatatggtttttcaccagtatgaattctcatatgttgctttaacattaaatcaagtgaaaattttttaccacaaatattacattcaaatggtttatgctttgtatgagtatttaaatgtctaataattttttgcttttgtgtaaatggtttattatctctattacatccttcccaattacaaatatattcagatttacctgatgatatatgtttatcaattatatgatttgttaataattcagtattctcaaaaatttcatcacatttttcaccattaataatccatttacaaatatgtttatcattattattatgattatcattatcatgtaattctccattatcttcctctgatgtctcagttttaatatttttaagtaattcagtatgttcaggaacatgttttaaaaataaatcaacattatcagtgaaaaattcacaatcatcccattcacaatgcagttttaaatttgataatttaatattatcattaaattcatctttaaaattatctggtgataaatgtaaattttgtaaatgattttcaaataaatgtttattaattaattcagtttcaatttcttcattacatgagtcccatttacatgtaagaaattcatcattatctgatagaaactcattcttaataatagtttctgtattgttatcattattatcatcatttttattatcattttcattattttcattttcactcttgattttattatgaccttgaatgtttgaatggaaatgttgattatgaatatcattttcaatatgatgatgtaaataatgatgaggtatagaatttgaacaaaatggtggtttacaatttggattattttgacaattttgtgatggtaattttaaattatgattacaatagttatgttttgtataatgtccattcctttgttcaatatattttccatcaccagtattattatcattatcattattattattattattaatggtatttgtattaatattattattgaatattgaatccaaattacatacagaagatgttaggaaatcagaacaatcttcaggtttcaaaattttattcttatctttttccttattattattaatattcttagtatcttttttagatttcactttcttattgggtgtggtattaattggtaaatcacaatcaggtaatataaaatcatgttttatcttttgaccatttaattgatcttcaaaatgtaaatgatgatgatgatttgaattattatcatgattacaattattagaattatgatgatggaaaataatatcatgagtatgctttttagaagagttatcaggatcatgatgatgtaaatgtaataaatgatgatgatgatcaatatcaagattcatatcattattattattattgttgggattttcagttggattataatgaatatgaggatgaatatgagaatgaatttgattattatcattattatcaatatcatcacaacaagcattgaagaaagaattaagtaataccatttcagataattcatttggaattatattattattattattattattattattattattattatcattggtttgaaaacatgaatcatcacaacaaggatttaaattaattggtatacagttatctataaaattttgatcaatgagtggactttcatgacttgtaatacttgaagattcaagtgaaggagattgaggattatgactatgactatgattatgactatgactatgattatgactatgattatgattatgattatgactgtgtgtatgagaatgcgaatgcgagtgtgaatgtgaatgaaatgtggaaatggtatattatgagaatggatatgattctgggtatatcgaatattatcattatcattattattattattattactatcagatatatgagatggatcaaaacaacattgtaaaaattgattaaatgtttttgaatctatataacaatcatttggattaatgattaaatttatatcattatttatatcattctgattagtattattattgataatattttcttgatttatatttatattttcattttcatttttaatttcatttttaatttcaatcatcttaactcatagaaagcgataataaaagattattatactagatgaaatgaaatagacttaaaaattggaaaaaaaggcccaagcaagataatgaatacacggatgaacatgtagttaaaataaatataatgataatttgataacctttacagtagataaaagaagataaattagagttaaattaaaatagacttatttgaaaaaagctattttgacatgttattgtttaaatgtcatgttgatataatattaatgaccttggtggtgattaggtaaccaagttatgatcacgtgactatacttacgtaatcacatcacgtgactgtaatattacgtaatgataatatccattatttatcccactaattaatcattaaatcgatgattgactacttaaatcgactaaatacttttctttcaaccgaatctgatactaatccaatgtaatattagtattccagttatatcattgagctactaagcggatttaccttatcctactctatattcattcattctcaccgaataagttccggtctatgccataatacttacttttctttgattattttaactcctttaattcatctgtattaacaatttctacactatttgcatattcatctaatattgaattaatttcatcaaataattctaataaatcagattcttcacttttattaatgttttccttcatactattattattattattattattattattattattattattactattactattatcactatttttcttactaacatgtcttttaacaagttcagtttgaattattgccgatattttcccgttgtttttgaaaataatatcaggatctttacttatcttaattttaattaccttttcgagtaatttacttaatttttcactattttcattgttacttgtaaatttttcaaataattcccttctcttattatcaaaatgtccctctctcttatatttctcaattatatcctctgtattcattatatttatatgtagtatcctgtatgtattagataatgataataacacataatctctaagattattataaattgaaattccaaaatttcagaaagggtcaaactcaccccacgaaaagtctgccaaatcgggagcgcattagtgggatgaatgttgaattttttcaatgtaacaatttgaaccttatattaggaccattattattattgttattattattattattattattattattattattattattattattattattatagtaaataaactttattttatctccagggttttcatttagacatggcttttgacaattgaaaacttatataatatttcaaacgtttaataaagtggaaatatactatagttattcactagtcgtttcttttttttctgaataattattattaatatttttatcatcatatcatcatatcatattacaatacttgatggagaagttaattatcaatgttgataaatgaaaatatagataataataataataataataataataataataataacaataataacaataataacaataataacaataataacaataacaacaacaataacaacaatactggtaataacaataatgatactactaacactgataatatatcctctgattcaaatactaatttgatcagctcacaactgaaaaaaagagggagaaagaaaacttcaaagggtccccccttttgttgtcaatttgaaggttgtaataaatcatttcaaagaagtgaacatttatcaagacataaattaaatcataatccaaaaaaaatctttaaatgtaatcatccaaattgtgtgaaaacttttgttagacatgatcttctagttagacatattaaaagacatgaaaataaaattcaaaaattaaatgaaaataatgaaaaatcaaatgatttcttaacttcagttgttctaaatactgatactttgaatcctttcacgaaaaagaatgattatatattaaattcaaatgttaaaagtttagttaatcaacataataataatcttttaccagaaaatagtaataataatatcaacaatacaaaccagattccattgaataaggatatggattctatcgatccatcatcaacaacttcatcttctacagctccaaatcttttcagttggttatttactgatcctggtctattatcaaataatatagttccacctccaaatgctgaatatttacatgaatcaatgaataatcctaagttttatacctaaaaataatgaaattacgaacacgaacacgaacacgaacactaatacgaatacgaatacaaacacaaatataaacaaaaatataaatcaactcaataactcaactacaaatgataattttgaaaattcaatgagttataattacaataccaatgttaacaatataaataatgatatcttatctaaaaactcaacaaaaaataattttttatcagaattaagtgatttccatttgaataataatactcataatctctttattgttcaagatgatttttcaccatcttcatcaagtgcaggttattttagttcaaatgataaagataataaagataacactaataataccaataacaaaaataatattaatactactaatacaaatactaatccgttaaataataataatatttttcaatttacagatactactaattcaaatgttaatacaatttcaagacctaatccaaactcaaatttaaactcaaatttaaactcaaatttaaacttaaatataccatcaactataaactcaactaattctaatcttaaatcatttcaacattctcagggtaagcaaataactgaaatttcagcttttcaatatgatgaaggatcaatttacaatttaactgatgatcaaatgaaagagattgaaaatttaattccagcattaaagggtaatattgattttacaaaattaaaatttgaaaaagctttaaaaacttattggaattttttccatccaagatttccaatgttacatagaccaacatttattgcaagtaatgcaccaattttattattattatcaatgattgtacttggatcaaaattatttatgtgtgttgataatataacatgttcagatgaaaagaaaattttacaaccaaaggtattatcagatacaattaccgaacctttaagatggttattatttgcatcaccattttttcaaccacctgcagaagtttggataattcaaagtttattaatgttagaattttatgaaaaacattgttcaaatagaagattacatgaaagatcccatttacatcatggtacaacaattcaattattaagaagatctccaacattaggtggtgcatcaactaaattgaataatgaaaatgaaaataatgaatataataatgaaaatgaaaattggtatagatggattgagattgaatcaatgaagagagcaacatttatgtgtttttatatggatgcaattgatgcaatttgtatgggacatcaaatgtttatttattcacatcaaattcaaatgacaatgccagttgatgatattgtttgggaatcaaattttaatcaatttactaaaaattttaaaaattctccacgtccaagacaatttttaattgttttaagagatataatgaatggtaatgcaactaaaacaaattcatttggtaaaaaaatattattagctggattaagtgcaattttatttcaaattcaacaaagggatttacaattattttttggattagataaatttactaatacaatttctaaaaattggagagatttattaactgctgcatttgcaatttggagaaatgatgttggatattcatgttgttcatccaaaactgcaattgataatttaaattcattaggtaattcatcacaattttcaacatctgatacaagatgtaaatgtgttgcatatcatttagcacatatttatatgtcaatttctcattatgatattttcattgttgcaggtgcaccatggagaatgaatgttaaaccatcatcaacatttgaaagaaatgcaattaaaaatagagtaattgaatggacaaaaactcgacattgtgatgtttcaattattcattgttatttatcattatttgaaatgtttttatcaccacaagattcaacatatgattatgaatataattatttacctgatgcagatttattttttagaagttatgtaattggttatatgttattagttatttggtcatatttatatattaagggagaatttaattcaaataataaaaattttgatattaataatgaaatgaataagaatggatataattatttaagaaatattaggaaacaattaactgataaaagtaatggaattttattacatacatggtttaataatataccaggagcagaattttatggtaatttaatgagatgggttaatgttttaaatgatattgaaggtttaggtaatataattggattgttagatttagttggtaataaattagcaaatgcagattatgttgttgttaaagaattaggtaaattattattattttgtaaagatagaacaatgggcattacagataaggaaactttagaaacaatgtatattactgaatgacgatgatatattaaaaaaaatattattcattaattgagaaactatatgatatataatttaatagtatagtatacgtaagaaaaaggatataaatataaaatattaaaaatataaaaatgcaggaagtaataaaaactaaagttacattcccatttcagcttgtaattctttcagagcacgttcatcttcatcttcttcatcttcaatattattagattgattagtatccagttttttagttggagctgaaggcatttcatttaatttttgtgaattatttggtataatattttgactttgtttttgactttgcacttgttgtatcttagaatcatttctatgagtatcaaccaaattagcttcagcttcttcctcttgtaatgcagctaattcttcatctaattcatcatcatcaataaattctgtacctaaaggcctactaattgcttcagaaatttcttcacttgcttcaacttgttctctaatttgatccattgtttcatcaactttatcaatatcgaaatctttatgtatttgtttaattgcctttgaaccttgtttcattgctttcattgtttctaaattcaaattagcagattcaattgcagttaattgagtttctaatgattcaatttgattttcaattttcattaaatcaacttctaattttttctttttctttaaagcatttttagctaaaactttatttgatgtaacatattttctagcaatattttcttgatcagttatttgtgattgaatataatttgtctttttatttaaagttgttatatgttcacgtaaatctaatattgccttctttggcagttctttcttttgtttagttcctccaaacagataattccacattgttatatacttagtaagtcaacaagataaaaagagattatagaaaataatttaatatattataattccttatcaacaagttctgtattaatcatgttaaagcagaagaatgattaaaaaagaagagtaaaaagccacagacgcatcgacgcaaaatgaaagaaaaacagacgcgacggacgcgttttgtgggaaatttaagttttcttccaaatttatattgataattcatttctgttattattatcgttgctatattttttggtattttatttcattttattttgattatttatttaattatcttatatcatttactaagattatatctatttattattcttcagtaatatataaataactactatttatagacattttttaaagtcataatgtcaaatacaacaaatgttttaagtcgtttgttcaagaggaaatctttccttttaatatctgcttgtttaattatattcatttatcattcatatacttcaataactgatttacaaaattcaaataaaccaaaacaacgtaataatttattacctgattatgatgaaggttattcaaattcaatttcatctaaattatcatcatcttataaatcaagtgatacaattaatagtcataattcaaatttactgaaaaattatttaaaagaattaagtcaatataaaccaaattcctcaaattttaaatgatcctgaatatcaattagaatttactaaaactgctgttgaacataatttagtttcattatcatatttagaatcattagttacaattcaaccaaaatggtttgatgaagttaaggaaaaacattcaaatgttgttaaattattaaaagaaaaaatgaaagcaattaaatctcaaaaagagactgatccaaatcattattcaaatttagaatttcattcaattgaaagggatggtgcagttatagttggtggtcatataaatgataatacatggttagcattagtttcaactagattatttagaaaagctggtggtgtgttaccagttgaagttatgttaccaagaagggaggattatttaaaggatcgtgaaatttgtgataaatatttaccacaaatgaatgcaaaatgtgttataatggaagatattttaaaattaagtgataatattgatggaaatggtaatcaaattgataacgatgaaattaattcagaaatttggattaaattttatgatattaaaagagaattagcaattttattatcaagttttgaaaatgttttatatttaacacctgaaaatattatgttaaaaccaatggaacataatatatttgagaaacaattatataaagataatggattatttttatggacagattatggaccaagaactacattagtttcattttatgaaattactgatattaaatttggaaataaaaagacaagtgaatttggattaccattaacagaagaattaaataagaaagcagttgaaattaaggaaaatcatttaagggataaaattaatttccatgatttagagaatacattaccatttaaacaaagtgatgcaagtgaaattataattaataaaagagttcatttaagtacattaattttatcattatattataatttaaatggaccaaatgtttattatatattattaacaggagataaagatggaggatttggacataaggaaacagttacagctgcatcacatgttttaaataatccatattattcaattaataccaatgttgatagtaatggatattggtatggagatgaatttcatggagtttcaatgttacaatatgatccaatagttgattcatattcatatgaagcatatatggataaatatagtaaaaagggtaaacataaattaacagtataaaaattatcaaagatggttaaaacaatcaaatgagagacgtagtccattatttttaaatattaataatcctgcattaagaccaattgaattaattaaagataatatagttaaaaaggagaatggagatagaattaaattaatttcagatacaccatattttggaggattatttgagagagatatttggagggttatgaatgattatatttgtcatttacaattagatagtgattatgttaagaaacattttggtaaatcaggatctaaagaacaaattgaattttgtaatggagaaatgaaggaacatatggtatgggttagtaattaatttattattaaattgtacgatatagaaatagagatagagatagaaatagaaatagatctaataacattataattacgtaatactaactaattaattaattaactccgaataattaactccgaataattaactccgtaaataaattttttttaaaaaatgcgtgactgaattatatcagaaggctcattaatcaatgattacttaacaatatgtcattaatagaaaataatctttattgtattactatacaatttccccagattttacattttccctattttcccctttttttcacttttctattttccattttattattattattattattattattattatgatcattattgccctttttcaattggttaatttgtcagatttatcttcaagggcaaatttatatttaaatttattaataaatttgtttgaattttaggtcatttggctcattacttgctttcttttatttattacgttttattgttccccatccctaagcctcatcgatcatattcatattcatattcatattcatattcatatcaccttattcttattacatattacacattatatttgttgattaacgacaatgtgctctaatcaacaatcatcaattaaaaaagaagaatctcctgatttggatgttcttagttatgatactaataataatatcactactaccactaataataataataataataccaacaatgatcaaatggatatagataataataacaacaacaacaataataatgataataataataataataattcaaatcttaatcataacacctcagattcagtcttaaattggaatataattaaaaatccttcaaatggtagaactagaatttctcaagcttgtgatcgatgtagagctagaaaaattaaatgtagtggtaaatctgataataatccaaaatgtacaaacttgtgaaaaagatggctttcccttgtattgtctcagataaattaactagaaattcattcccaaaaggttatactaaaaatttagaaaaaaaattattagatgttgaattaaataggaatcaattattacttgaattaaataaattaaaacaaaaattaagtttttatgaaaataataataataataataataataataataataataatgaagtttcaaattttaataataccatcaaaaatccaattacaaatagcagtaccacaattaataaatctaatgataatatgactattgatgaaaatatgttacatacactctcatatggaaataataatactcttccaaatcaaattaaaaaatcatctgattcaaattcaaattctaaaataaaacaaattaaatccttttaaagaaactccaaccattagagataatgctttctataatacaaacattttaacaaatagtaatggtttactggttttagatcaaaatttgaaatcaccatttgaaaccatttttgcttcattaaaatcaaatccttttaaaggttataattctggtaataatacctttttcacagcatctgattcaaaaaatgttgcctcatcatctgttaattcatcttcaaataataataatatcactattgatgataatggctcatatattaatgatgatatgaatcttctagcttataaacatttaaccaattatcatatgaatttaaatagatatttgaatttgatcttatacaaattaatttttcctctttttaacctagattcaaatcataataaaacaaatggagatgcaatggctggtttagaatcaaataagaatctagatcatttaatttggctatttttcaatgactataataaattaattccaatattagatttcgaattattttataatgattatcttaattttgttaataaatataccttaaaaaactcaacttattcagataatggggaaatgaaaaaaagatattatgaatttaatcaaaaagaccaagatactttgattaagttgattctggtattgaaatttaccctatgtcaaccaaaaattaatgaaaacaatagttcatctgcttttctaccggataaaacatctttaaatcaattagatgaatcaatcaagctcatcaatctaaaacatattattttaatgtttagaaatattaattttctattatctccaaatttagataaaattgaaattacattgttaatctattattatcttatcaaatttgaaaactataatttaccaaactatactgatagtgttcattctcatattagatttttgttagacattattaatattaataaaggtttagtgaatagtttgaatattaataaaaaaaatgatttacttgatattaatacaaaaacgaaagaaaaaaatataattgaaattcaaagattaaaactttattggaattttaaaatcttaaccaagttgtcagaaatttatttcaatattccattaactaatgaatataatacaattacaagtgctgaaaatacaacttctaaacctgcaagtttagaaacaattgttttggttaataatgatataaatattacattatgcttagttaaattgttgaaaattattccttggaatataatggaattaattaataataaaaatgaagaagatttaaagaaaattgatgcaaatttgtcattatggaaaaaatcagttgaagatttatataatgaagacaattcagttgttttcaataaattaaaatcatactatttatactttaaggtattagttaatattaatggttcaattgattcatcctattttattgactttattgacctggtatatgatttaacttttaataatccgaaatcaagcaacaaaactcatgaaatttcaattgaaggtgccgaaagtttatgtttacatagtttcaatttccatttagttacactaatatcaataacaagtttacaaaatattaaggataagttagtttgtcaaaagatttataaattgattcaattatatcaaatattgattaactataaagatgttgatccattaattaccacctttgtcaattacataagagagaacattctgtattcttttacagatgcaagcacagttcaaaatgatacacttcaattattttcttcagttgaaatgaataaatcaagaaatagttcattatttgataaaaagaaatcaactagaaagaaaaaagctgcctcattctctaatgcatctggttcaagctcaatgaattttgatttaaatgcttttaattttggatctgaatctttttgttcaaatgacgattcaacaattagtaaaaggagaaaatcaaatgcttccaatacaagtcatttatcttctaatatatcagttgtttcgaaagattcttcattaatatcttccaatagaagattttcagcatcttcaaatgatagcacaccatcattatttgcatcagctactagtccatataccaataataattttaatataagtgcccaaagtttgaatgcaagtaataatagtagtgttaatagttacacagctacacttgcctcaaataatagcaatactaatgaatcaggttttgcacaaccctctacatcatcctctgtaaagatgagacctagtgataattcaattcaacctctgagaataatgaatagaagcagatcattatcaacagattctaaaattcgttcatataaagttactgacaggcgtccatcaatttctaatcaatccaatacacaaagtttccttagtagagaaaattcagttgatgcaagcaataaaagctttacagaacatttaactgacgatgaaatgatttctcaaattttaaattcagatgttgattcagaggcagattccgatataattggctcttcatcaagcaaaactagaccggtattcaaaccaaatacaagtttattaccaacaattccatctgaaggtaacttaatgaaaataataagtgcatttgaaccaagtgcaattgaaactatgaagaaaacactgccaattaatgaagagtttaatgttgattcatttttttcaatcaattcaaattccagtctagttaatttagtaaatcaatcagcagattctaatttattagaaaatagtttgaatatggcaaacttttccaaagctttcaaaaaatcaccaacaagttctgtatctgttgctaatgtttacaacaatcaaattaataattctgcaacttcaccggttgtaagtcctaagaatgttgatactattaatacagacaaaccattgattgatgatgaagacttgatgagattgaaagagcacgttctcagtttgaaatcatcaattagttaaatattattcctttttacattcctttactctttcaattctatttgatttttttattttcctttactttaacttttttatttaacttgagtttcagtttatgtacactacaatatgtttttaataatactttttctctaaatgaggctttaatttaaatgttaactatacaaaaatacaaaattatttactgtgtgatatcaatatttttttttaattgtttgtgggaataaatcaatgagtaagttagtttggaagtttattcatttttttaacaccatctcctttctcaatttcccatttatgttttgtcacaataacttttctaataagtaagtgaattaagtatgatgaagatccaaggaatctaaaacaactgaaaccaaaaactgaccatagaataaatgctaaatatttattcgaagtaattgaatcaggtttatagatttgtgtaattgtcatgactaacacgacatttgcaataacccaaaataagacaactcttgatctaacatctctataataatcttctttactaacttctgctttctttttaccaccatctttactacttttatttctcatatcaactggtttctttcttctttccttcaatttgagaacaacttcactatacattgaatcaatatcttgttgttccaatataccagttgtaataaattgatgacctttttcatcggtttcaataattgcagaccctaaagattttgtaacttcagtatcaccctttgtaccccatgaaacatcatgtgtattacaaaaagcataaatttgtaataaacatgtatatgcaggtaacatcataaaatattgaattgatgatgaaaaaatatgccatggatctaaataaaggaatgacattaacacatataaaccataagttgatgccattgaaacacaaattgatgcaaagcttaatcctccaactgtaccagcattatgacttttaatcattaatgataagaaataaaatccagaaataattgcatacataccacaaattgtcaataaaataacacaaacccagaataacattggtgctcctgttggtttattacccattgagataactaacattgctaataatgtacaaatacagatataattcataatttcaaagaaaattttaccacccgttcctccaattgtaatcaatgaacctgcaagataataaaatgtaatatagaaatttgagattgaaaagaaactgaaaattaatgataatgcttgatagatgaattcaatataaaagaaaaacttcctcattgctgaatgatctgtttgtagtatttgtgatgattgttttaatgaatacattgctgcaaagaacgcaccatttaaccaacgtcttctttgaagaacaaattctgataatgtttcaggaacatcagtttcaccctttgcatctttacagtatttcaaaacccattgtgcaccttttttagcaactaattcccatgctaaaattctatcttctgctaaatacatatttgcagagaaaatatttgccatatctgcactatcttgagtttcaccttgaaagtatgcctttaaaggcccggtaccatcaggatgattcttcagtgcatcatatctatatgcagataatgcaccaggtaaaacactgatatatccaaaaacagactcacatggtttatctaaaatatttgacattttatattcaaaattttgtgatgaaactaatggatttattaattttgaccaatatttacccttcattgcaacaatttcaccagctgcaccagcaacattggaatctaaatcaaacgctttccataagttatagaccgcagtatcattaggtctagtaccaacatccaataaaacacaaacatttggatttaagacaggacaaattgcattaaataaccacctatgtgaattaattttttttgcatttttctcttttaaacagaaaatcatttgaactggtgtggtttctttaccaccaacaatctttaagtcttcattaactgaaacttgtgtagtatactcaaataaatgtcctttaacttccttttgattcacaaaggatttagcaattccttcttgatatacacccatagtacctaaaacttccaaaataccaggactaacctttatttctaccatcagatacaatacaaacaacaacttttttccatgaatctgcaccccaagttgaacttctctttctgcttgtcaaataagcaatatttctgaaaacagcatgtaatgttcttgtcaatgcaacttcatcttcattatacattgtaatacaaataacaatttctgtttctctttctaactcaatttgtcttaatgaaaaaccatcttcaacaaagtcatctggatcagatgtgacagcagaatatttcataaaatcaaattcatcaacatgctttaatggtaataaatcatgaagtaaacctggaattggagtatctaaaacaagattacctgttcttgatctaaatattgtctgtttattatgaaagttatttcttcttggttgaatcattggtgctttgtccattaaatttttatcgaaaataatcagagccagagtcagacatttttgacattcttgatccatttggaaattcaaaatctccatcttctggaacattaattgttgattgatccgatgaaaaataagatgaaacactactttttgtcttagatatttttgagcccattgatgaacccattgtcatttcggaaccaccagaggaaactctactaccatctacttgttgctggggaatggtatatcttttaattgatgaatttggagttaacattggaatattacctaatgattcattatcatattgggcataatcatatgaattttgagagaaaacgggtttaggtgtttgtaacatattacgattatctgaattatttctttttgggctttgattgaaaattgaataatgactgacaatttcattattttcatcttctctttcagtatcattgaatggatctataattgtagaaagaagagattgacgttttggtgattcttgttcagtgaaaagtttacgagcagttgacgatcttaatggtgattcatcagctctttgaataaaattacgtccaactgtactattgacaaaattattcgaatctcttctaaaagaaacagctggagaatatttcatagctgcttttgatggggaatttctttgtggtgaattacttggagtatatgagtcctccggctttttaaccggagattgcaaaaccctgaatggattctccctgaatggatcagtcatggtttcttgcttctctaagtcaatttcaaaaagaaaagaagtaaacttctatttttgttttaagaaataaacgacatattgtgatttctgatctatcatgaaactaagctagccttcaatttagagtatgcatgttattaaagtttggaaataaaagttttctataatttcctttttgggcaaaagataaacatcccagatatttttcatgatttgctgacgtaaacattttcaatgttgatgtttgctaccattgcgataagacaagtttatttataaaatgttattaaaaatgtagtctgagttataatatggatataaatataaaagtttatataggatgcaaaaatacagctagtacagaatgtaaattagattagtgtttagattcgtatgcctttttagccaaatttacaagatcttcgaattctcctgtatctttacacattgatctaaattgtgaatcagctttttgaattaattgatatggatgatcatactctttgacagaaccatgatctaaaactaaaatcttatcataatcaatgattgtctttaaacgatgtgcaattgttaaaatagtactgtcagaaaattcttctctaattgtattttgaatcattgaatcagtttcataatcaatggaagcggttgcttcatctaacaataaaatttttggtctttttaataaggatctggctaaacaaattaattgtctttcaccttgggataaattaccaccatcttcagaaacctctgcatctaaatcagtgaatttattagtgttttcatttgaatttgaatcagattgcatagttttaatatcttgtccactttcaataatagtctttaaactgttgtattcatcccttgaaattaatccaacacgtcttaaagattcataaatatcaagatctgaactttcatcaaacatatctaaattggattttagtgtacctgcaaatagtgttggttcttgtggaataattgctaaaccttttcttaatgcatttaaaccaattttagaaatatcaacaccatcaataacaattttacccttttcaggttctaagaatctaaagaaacttgtgataattgtagatttacctgcacctgttctaccaacaacaccaactttctcaccagggttaacatggaaagaaattcctttgataacaagtggtaagtttggtgcatatctcaatgataatccttcaacattaatttcaccattttctggccatgatttaggtgggtcaaattcagtttcaacagcactttcttctttgatatctttaatatattcttgaactctttcaacagaattaatattaatttcaacatcagcatatgaacgtaagagccataatgcactaacagcaaatgatgaagcaaatgataatgaaataccagctaaacctgaatcaatataacgtgctgctaaaacggaaagagctgatgaaattgcaacaattaaagaacctactattaatgctctatatgacatccatctattattagcccaaacaaagaaaaatggtctattatttgtatcaatcttttctaagttttgaataataaatcttctttcatcaccataagctctgattgttgtaacaccattcaaagtttcagtaaaatgttgattaattggtgatcttgtaaccgattcaaaacgttttaattctcttgataagtttaagtaaagaacaccaacataaccaaaacttaaaacaaccacaataccaaaaataaagaaaattggagtaataaatgtaatcaaaattaaagtactaaaacaaccaagggctgaaatgaataaagcttctgcatatggtgcaaaatcttgatcaatactttcaatatctttagaaaatctgttcataatacgaccaattggagtagaatcaaaaaatcttgtttctgctcttaaaacttttttcaataaggtttggaacatttcacgtgcaacactcaaaccaccaaagtaaaccataataattctgaatgaacccatagctgaatataataaaccaattagtgaataaattgaaagataatacattgttgaatggattgcagaaaattcagaaacatcaaaattattatattttgtttgtaaaattggtttattccattcaattgattttaaaattgataaaacattagtgactgcaaaatcggatttagcataaactttttcgacaatacttttgacaatcataccagaagcaccagctttatcattctctattaaagcccaaattcttaaccaataagattgataaatattaatcaattgagttgaaatgaatgcaaataacaatagtgcccataaccatggaccaccaaatgcaacaaaataacttttataaacatcaaatgaaacagtaccatcacttttagtttcttcttcaattagcttacctgattgatcaatttgaacgtcatcttcaacaggttcggaatcaatttgatcagcacttaaaccagattcaagagctgcagctgtactatttaataaacgtgtatggttttcaccaggttcaactgcagttgccatatcagctaaattaacggatgatgcaactcttgattgcataacagaagaagttgtttcatcatcaaatgcattttgctctaacattttttcaacagtaccttgatttttaactctaccattctccataatgacaacatatgatgcatctttaattgttaatgaaacattatgagaaactaaaatacatgtacgatttttcattaaatcaccagtaatgcagttttcataaatatgaacagcagtatgagaatcaacagcagataaacaatcatctaataaaacataagcagcatttgaatataatgctcttgcaagcgaaactctttgcttttgaccaccagataatgtaatacccttttcaccgatttcggtttgatcacctgcagctaaaatttcaaaatcacgttttaaaccacatgcttcaattgttgctgtataacgtttcttatcaaatggtgcagcaaatacaatgttttctttaatagttccatttaataaccatgcagtttgtgaacaatatgcaactgattcagttaaaccagttttactatcaacaattaaatcatctctcggaacataacctggcaagaaaactttaccatcaattaatgtcatttcacctaaaagtgctaataataaagaagttttacctgcaccagttggaccaataacaacatttaatttacctttttggaaattaattgaaatatctctcaatttgaagtcatttgaactatcaacatcccaagaaaaagttgcattttgaaaaccaacatcaggagagttttcatctctttcattgattaattgttcatatttagatgattcaggttcttctaaaaattcttcaattctatctaatgaaacctttgattgaacaacgaatgaaagcatatcggcaaaattatcaagtggagtacgtaataaattgaataatgataacgcagtaaaagcaattggtgtagttaaaggtctctcttcaataacggtataacaatagaatgcaacaagacaaaccaatgttggagtgatataccaaacaaagcatgcaatcacccaaatgaaacatctcatccaaagtaattttaattcatcatttctaacattaagaatttgttcagcaaatttagattcccatgcaaaatatttaataattctaatattttggaatgcttcatttaatttctgaattcttttatcagtaatttttaacatagccttttgataattacctaaaatcatacttaatttataatttaatggcattaatgcaacaatagttgctgcaccagctaatgctgcccaacctaataatgtataaagaatagtaatagcaataactgtcataacaaatgaattaacaaaataatgtaaataaccacaaatttcagaaactttgaaagaatcgactgcgattaagttgatgatcgaacctaaatctcttgttgaatcttcattatcagatttatcagattctgatgattctgcatcagttgattcgttatcatctttctttttacccgatgaagcaacgacttttcttcttaaagattttgaataaacttcactgattaaaatggctctcattctagtacaaattcttctacctaagaacaaaccacgaccactcaatccagatgaaattggtgctgaaaaaaccattaaaataactaataaccatgcaagacttgctgattcggtatcaggagaatcaacatattcaaggattttctttaataacattgatgggaaaaatgttaaaacagcttctaaagaggtaagtatagattggtaaatgaataattttctaaattgatagaataaattaactgaaaatcttttatgccacttcagtttatgaaatttcaaaacggttggatatgcattatcttctaatttcaaactccaaatatcatctaaagttggcaatcttttacgagcatccataatcattgaatttaaccaagagaatccaaatacactaaaaaaggaagattgtgattcaggcgaaggaattaaaccttcatttattaaaacagttacaggtctatcagtaaaatgatctaaaccttgaataataaaaattattgtaacaatagtgaattgaatgatatagaacatatcagattttgaatttaaagtatgatgtaataaagctgaacggaattgaaaaaaattaattgataatgaaactatgattaaattgaaagtttgataccataaatctggatagcttaaggataaaccatttgaagaatgtgccaatctaattgaagttaagatgaaaagatatgtccaaaaagcagcatttattattggataaattggagattcccattcttttgataaatcggaaataacaaatggggataatgataatgcaattaatgataaatataaaatttcttgaacaaataacattgtacgttcaaggaaagttctgaaaacaatttttgttgcaacttttttacttgtattggaattataatttaaatattttatactaaaatgtttttctagtatagtatcattagtggaatctgtagtatcatcatcatctttaagagtagtagcagttgagccataattggtaacattattatcttcttcaattgaatcatcttgtactggtaaattcaaatccaattgaattgaggacttgagtatattatgttttacaatataataaaggatatgagttattgataatattattaccactaacggtatatacttttcaagtatttgatgtcttgaacaacgtgtaaaatcgtccaccagccaaaccttgtcacagaatgaattgttcacttccctgattgaaatccatttgattgtttgagtgaaatgagttacgattaatttgtgataaagtttaagataaagtatagcaagttaagttaaattgataagaaaatttgccattgaaaatattattctgtaaaaaaaattcaattttattaattatgactattacatgattactatataactaatgccatttacgtacaaggcagcatccacagtattagtagttactatttttctgttatcaattatcaattatcaatcatcaatcagtataatgagtcattatctattactgttattttaattataaaactgattatataccccatgaaacattatttaagattaattaatacttacaaaaaaatttaatcatcgttcttatcctttgaacctcttaataaaccagttcttcttgcagcaattaaacctgccttttgaccagaaactgcacctctagaaatagtagaagccttaccaatatgttgatggttaccaccaccatgagggatgatcgactgggttcatcgcaacacctcttgtctttggccatgagtttctcttaaccttatatttatggaatgctctacctgcctttaataatggtttatcaattctaccaccaccagcaacgacaccaataacacctcttgcatcagaagaaataattttctttgcaccagaaggtaatttaactctagttttattttcatctggattgtgtccaataatgataacataattaccagaagttctacctaaagcacctctatcaccaactttttcttcaacattggagacaattgtaccttcaggtaatgaacctaatggtaaaacattaccaatatttaattttgctgatttaccacagtaaataaattgaccggtatagacaccttcatttgcaataaaagtttcttctcttaacttgaatctgtaaggatctctgaatgaaactttagctaatggagcacctctacctggatcgtgaataatttgcttaacgacacctctaatgtaaccatgtctttcagcataatctaaagttcttaactttgcagcaccctttcttaatctggtgtgagcagtaaagatagaacctgcaccctttctttggtttctaataactctacccatctttggttcttgaaactaagtaaatctagagttatacatcttaaacagtagagtataataatagcacacactttggaaaaccttacgtaacagtgaaaaatttcaatatggtgattgtttccaatttgaaaagttatttattatttctatgcgagccctcttagcccttggtgcaatcacgtgatatattggattctaacgactctttggattggatattgttaaggtagtgctttacaagattacttgtgataaatgattataatatgccaatagtcacgacagttgacttatgggaattaaattttattagcaggattcttcaatcagatacatttttgttatctctatttggaccataattataatagataacatatagactttacgttagtatcaaaatacacattactttagagtataatttcgttatccccaaacataccattattatgctataaattacattatgcactcttccaaagtaagaacaatatcaaaaagaaaagcggtggctcatcaataaataatataaacggttgataaggagaagaaacagaaaaaaattatctaagggtgcgcatcaaatcgatctgttaagagatctattattatcagagaatgcattattatcatgaattattatatgattattaagatgattgaatattatcaagttaatatcatatatatcatacataatattatatagatattattagtattatatataaacagtgattactcatcagagacgacaacttcaatttcaacatcatcgtcatctacatcatttgtagtatcctcatcagtttttccttcacctaccattccttcttctttttcttcctcatcatcctctgcattaattgcaactgtaacatttaattttttaccattccaaatttcattatcaaatttttcaataacagctttttgagtttcttcattttcaaatttaacaaatcctatacccctattttgaattttaatattattatttttcaacattttatacatttcattagggattgtctttcttggtattttaacccatttcggattataatcttttaaaaattcagttaattcatttattgttacatccctatctaaattaccaataaatacaatacttttggaaggtttaccattagctaatttacgttgtctttcttccctatctcttgatcttgatctggtattattatgattattattatgatgattattatttagatacttcatattcatgttgatatttggattaataccccccatattcataccacccatattcatattcatattcatatttggattaattgggtatgtattgataggataaggattgattggataagggttaattggaatattcattggattcattggattaatattcataactggtattatttcaattggagttgggaaaaatggtttgatacttttattatcaagatttgaaaaaaatgatgtcggtatattattttgttgttcattatcttcattctgcttgattttcattttcaatttcaacttcaatgtcaagttcagtttcgggttcagtttgtgtttcattaatttgtgtttcattagattgttcattagtagtagtattattttcatcatcagctgataaatttggttttgtattattatttggatttggtgatgataataatgaaggtgtatttgaagatgatgtagtaggtggtgttattgtagtatttgagttattattactaccattaatatttttattcggataaaaaggaattggttgaatatgtatattctcataaggatttgaataataataaggttgttgacttgttgaattatttctcatttgatagtttgtattataataataagttttagatttaaaattattaaattgattacgttgattgaattgattaaaatgattttgatttcttccatcaaatgaatgatttgtcatgttgttattattattcattttatttttattttgaggtaatgcatatttagcataaatttccctacctgaaatttctttaccttcaattgaaacaattgcatttttagcatcaattgcatttgtataagtaataaaaccataaccttttgattgtaaaacatatttattttgagatttatcaaggaattgctttcttggaatttcaactgataaaacatcaaattcaggagttaaatttctaacatcatcttcagtaacttgatagggtaaattaccaacaaagattctgtctggaataatatttaatttttcatcatcttcggtattttcattattttcggtggtggtattttgatcagtattttggtcagtattttgagtggtactattattattattatcattatcatttttatcatttttaataatctgtttatcagttgaatcatgatcatgttgatcatgatcaatttcattattatgtaattgagcgactgtagtattatcgacagtcattgtatattaaattgtattgtattgtattactataagcaagtgagatgacaatgatctgatatattaatgagaaagaattgaaaggttaaaagaaagaaaggtctaattgagaaggtaataatatgttaaggtaaccagagatagattaatgatagttgagataattaactcaattaacaaacgaagggtatatgtaataccaaagtaaaataaaatgaagtgaagtgaattgaacagaatagaatagaatagaatgaaataaaataaaataaggaatactatagttataacaaatgtaacagtaatttaatagactatattccccacacaaaaggtagaaaatcaaacgggttcataccattggtcaattacctaataaataaatgaacttaaacagaataataataataacagacttatcctttaatagacatctgcttatctaattaatattaatattaattaactcggaaatttattcccactttaattattatggcattttctgttttgttttaactccggagactgctgggggagaggcggtgtgaatttttgtgaatttttgactttgtggtggctggtgatgatcgccaaatttgttacttgtagttgaagttgaagtttcaaattttaatttaattactaaactacgtgttcttgatggtttctttcaaggtatgtcgatttgatcaattcgaattgacatcactcttctattaaacaataataatataaagaacttttacatataggcctttccgcttgatgtcatgtgcagtggcttcagttgttctgtaaaatgcagaagaaattccatcacctataaagtttcaggtagtataaaagaggtgccacaaaattttccatcagagtcacatccttcctcactaaacatcatatcatcaaaattgatggttctattcatatcagcaaaaattctgagtaaatagcatctaagttgtaattccggtgttatatcagaaacactgctgttctctgaaagctgcattccatataaatgataatgcctctgtgataaatcttctgtcaaatactaagaaacatcactgcctatgaatccagaagtgtccaaaatggataaacttaaaagtaatatgtttacaattaatctcaacccatgtggtgttcttcctaaagttttgacgcatttaatatactcttcatcagaaccaacaaaaccaagtgcaatacaagcttcctcatacgtaccatgaccaaacttcaaatcatcaaatgatgtaggtcctttcactgaattcaacaacaaatagacaaagtatttatttttatcctttgcaagaggtgtaacaggaggaacaaatgctattgcattaatctagcaacccattcattcttattcaaatcccaacggaagtcttttatcgcttccttataaaggattttactattcaagtctgaaatattcgaaaaatatttaaataaatcttttagattatcagcatcatatgcagcagcaatttcaggatcaacatcagacgaatcattgtgataagccaagtatgtgttaattcttttaatcaggcgaaaaaatcctagtaaagtacttgtccttgactcattgttctgttgtctttcagcagcttcttctggactcattccaaacagcgtattatatatgtgattgaaaattcaagctagcttagtgaagtacttgttcaagactcattgtcttgttgtctttcagcagctttctttgtataaacctttatataattgtttaatagttcttttctatcattgatattgttataccttgtcaacatgaatccttcattaaaaatattacgtaaccagacagacgcgactgcaaaaagttaaaatttaaagacgcgactgtgctgacataatcattaaagaaaaaatttcttgttaaccaattaaatcgtttgaatcgttatttatattgctaaattcactattcgctactcattttactatagtaaattatcatgttgaattattataatagtaaatttcattatagacaccatattacgatgattttatattttaattttaattttaattgaagttgtaattattattatccctgtcaattcttcattaaataacaattaataatatgtcatttgttactgatttaattaacgcttttgttccaactgttgcttacgctgaagaacctgttgaacaagtatctgaagacgcaactgttgaagaatcaactaaagatgttgttgatgtagcacctgctgaagaaaaagaagaagaaaaagaagaagaagcagaagcagaagaagatgatgacgaagaagaagaagaagaagacgaagatgatgaagatgaagaagaaagtgaagatcaattcgatgctttaaaaaaagaatgttctcaacttccatcagttaaaccaatccttcatcattacgaagaatgtgttgaaagagttactaaagaacaagaagaaccaggttatgatgaaaaagaatataaggaagattgtgttgaagaattcttccatttacaacatgctcttactgattgtgctgctccaaaattattctcaaaattaaaataattttgcataaattctagtagtagtaacttaaaatatattaaaactatattcatcaatcataaattccattttcagttcaataaagaatcattttcaaatttcaaatttgaataaaaataaacttaatgataataaaaactaaacatcaatcactaatgtcaattgtatttcatttttcttaaaattaaacattatttaatgtcatatattattatatcattattatcattacatttttatattatttattataatacattttctcattatattatttatatcttctaaagctaaaattataaaattattaaaattatagaatcataatattttgaatttctctatattataactttaatgtacaaaataaaagtcaatgtccttaccaatcactctttgttataatacaaatgcaataatactttttacttactaaatttttgataattactttattttaagtttaaaaaattctattacaaatatattactttataattaaattaattattttgcagctgcaacagcttgagcagcaatcttagctttcttagcaatctttgcttgagccttttgacccataataccaccaccccagtgtctctttgattcatcgaatttttcggtgaagttagcattaatagtagaaactaatttagctaattcagcttcatcttctgccttaacatcaactaaagctgcaactgctgcagttttttgatggactaaagtacctaatctagccttacctttaacaatagcgtatggaacacccatcttttgacataaagctggtaagaaaataactaattcaattggatcaacatcattagcaattaaaactaatttagctttcttgttttcaattaaaccaacaacatggtttaaaccgtatttaacaacatatggtttttcagagacttcttctctcttcttaccttctgcaatcgctgctgcttctttagttaatctttctttcttttcagcagtagtttctggtctatatttgtttaataatttgaaagtttctgctgcagtgttcttatctaaagtgttagagaattgtgcaatagctggaggaacctttaatcttaatgataagatcttcttttgtctttgaagtctaacatattctggccatttaacatatcttgataagttcttctttggttgaattgcttgacctaaaccgaagttctttggagttgcttcgaataatgggttctttgctgctgcagtctttgaggacttagtagctaatggtgctggtgcaaccttcttaccttttggagccatcttggttatacttgctaaagtaaaattctaaaattaaagaaattatttagatctacaactctatattaaaattaagcactatgaaaaatctgaaaaaaaatatcatcatctttcatgttactagtaactgagcgaaaaaattataactgctggaaaaaaaagcacgcaaattttctttttattgtaggaaaaagggcaaagtcacgtgaaaggtgagagggctgggttttggtggtttttctatagtaagatatttggaatagtttcaacccctaatgattccatctgttccttaaagttaggcacaccttcctttaatgtattgacaatctcagtatgctgtaattataggtaatatggttagtattatgctgtcaattgatatgttaaatagaattgaaagttacttacaattttcttcatcttcttgtattgtcttaaatgattgctttcatttacttcaatttccctaaatctgctatcagtatcagtatctttaggagtattctgtattttcatcaaaccttctaacctttcattcaactcattttgaatttttctcaagttttcaaccgtgttcttcaattcatcatctgtcagctcattttttaatttagtaatttctatatttggttagttagtatactgttctaagtcaaaataaaggaagttatacaaataacatacctcccttgtattgtgaaacatctttatcaatgatttcaatttcacctacttcaattctttaagttgttcaagtgatattggtataatattttcatctaatttccttctcaacattacagtaatacgctaatttaccataccttttaacaatcatcaaattctcatcaactaaatcatcaagaattttgaatcattaatgcttttggtatacgattatgtaaattaagaactaaatcagttactgagtatggtctgtactccttctccatatactcaataacaacattttttgctttcaaattgttagtattatatttctattatcatcctattaaaacattaatatacttatacagatacataccttcatcataacccaacttctcaaccttctttttactagacattgtattgttacaagaagaaaagacaaagaaaaggaacaaaaggtacaactccggaggctcagcaaatatcctgaaatttcttatcgccccccttttgaatgaaatcaataattacgtaatttcttttggcatcttcattattgatacaactaacgaagtccaacctagaaagtgtcttgacttttcaccaactcccttctcttcattatattgctcccaagcgtaacctgttcttttatattcgttgaacacagtattaacaatgttctcacgtaattcaacataaatctcatttgctaaattgcttccttcttcacttacattttcatcacttccgtaatgatacaatgcttctagtatcaaataattaatattaacgtagatattacctctccaataatcatctcctttgtggtaattcaaatccttcttagataatgatcttataccgtaatttgaccataactttgatggatctttcaatgcttttaaaatttttaccaatttaacattgtcagaagaatcaatcaatatatgaataaatggcattaatgtcacatatccttcatgacattcaaacatatcattgtcatcttcatcaacattaacatcacaaaacatttcatcattttctgaccaatggacatcaacaatattcttaactatatcattatatctttctttgtatgttctcaaatcatcgtattcttcaataatttcagctatttcgtacattgatctagtcatcaaacccatccatgataacaaatcaacgtttaattctccaatatcaacatcacctcgtggataatcatccataccactaggtggtgtagtatcttcaccacgccctttccacctgtaaatttctttattatttgaataatcacgttcaatttcatcagaattacctctttgtgtttctctaaaccattcgtaatgtttttgaagtttaggatagagtttacgcaagtaaaatacaagtaaatccatgttttcttcatgtaaagagcctaaactttttttgtctaaaatatcagaagccaatgcatggccatctatgacattttgtgaacttttagacagcttgattatcttactcaaggcaagcattaaagtcggaggactcgcaatatgtgtatttggtactattgtttcggcatatgctttacttctagcctcatcacctaatatttgttcctttgcaatccaaccactatcatcaattaataaaacccagcttttaatgatttctaaagctaagtctgaatcatagtcacaaattggtaataaatgaaacccttcatcccaatatcctcctcttgaagcaaataatctactagatacacatgtaaataactcatatggtccttcattaccaccttctatttttgaatttatatgaactgaatcctccttcatttcatctttatttatttttcgatcatcatttaaataagtgattccacccaataattgtgatagtatctctttagcaaaactgatgtattcttgtatattaaatggtacacttaattgatattttctcgtgaacttatcatcaatcaaattaaacgtttcatccagcttaccagtgaaatcatcactatcaaacttatcatttgattcatgcatattgaaaacaatatcaaactggaaatcacctacaaacgttttctgaataaaatgtaaatttcctttgaatccaaaagaatttctaatctgaaacaactcaataggtgaaaactcatacgttgtcttatccacagtttctaattgttcaagatttaacttaactattgtccagaaaatttcacttgctttccaaacttcatctttcggcacagtcaacgagacataatgtgtcagtgatggatcgtagctgttgtcaaaatcaatggtattacttactgccattacattatcaatgtcgtcaatgattttaatatcaaacatcccacctaaactttttaagttaccgtttagcttgatatcctcttccaccaaattatttgatccgccagcaaattcaccatcaaaatctaactcaccatcctgcattcctacatgataaacaattgagtttatcgaatgtttattatgagtcttgcctttaactcttaaaacccaattctgtccatcatcacttttcacgaattcagtggtgatgtttaatttacaatcatcatcaacaatagtttctatacctccatatctgggatggtagtcagtccaaccaaactttttgatattatgtttaggatcacatgattgtttcgatagtaagactccatggaatgtatctgctggaaaccataataaaccagttaatatagagtcaggtatgcgtggcctgagtcctaaatataagttggaacgatatggtccccagagtagtgaattggagttgattttattatattcatcttgtagaaaattgggttcaataagttcaccaatgacatttgtcaatcgaaaatatatcaacagtaatgccaataggactccatccatgattatatagtaaagatttcatcattaagttttagagataaagaagttacggcagtgaatgaaattttatcagacggcatgcactctaactgacacatgagttcagtttcttttcaaaatgttgtacatgcaattaagtttacacataattctataatgctccataataatatacaaattctataaagtggttaaaatcagaatcctgttttacgtttcttctttctaggaccctttgattgtgattgtgaaaatccaaaactaggttgttgtgacattttttgactcaatggaactgatgtttttggctgtgacgttgtttgcgacaagagtcttgaatttccctgggattgcgattcaagtatattaagttgtgaactcattggagtagtacccctagattcagattttttcacggtagtaatcgtagttttaggaatgaatttagattttgactttccatttgatttttgtcttacttttgggtgaactaattgagatgtcccaataactggaggtgtttgtgatactgacacggaaggcattgataataatgaacccatatatggatcagtactggtgtatcctttctcttcttcttctgagtccattataccaattgcattaaaatcatcctgaaatgatttaaccatttcttgatagcttttgggcaaatcagcaacggaatcatcaagttcttcctctatcattgcatcatctaaacttttatatgtcttccaaacaccaatcaaacttaacatcaaattcaaaattatatctggtgaagtctctccattatttatcgatttgaaaaattctaaaatgttatctgattgtaatgaaatatcatcatcagactctagatgataattaatattggtatcacaataccattgattattcagtaatcgaatagacagctgttgatttttatcatttcgtataatatgttgcacaatcttaaatgtattcttaatatttcttggaatatgaatactaccaataagttgaaacaatgaactaaatgtcaatgtagacctttctaaataattttctaactttttataaatttcaacagtaatttctgttgcttgtggagaggagtcgattggctgaatttcagaattatttattgtttgatataatgattgaatatctaaagaaaaaaggcgatcttgcttaataatttcattagtttcaatgtgtaggtttctgtgcccaattatgcgattgtcttctagttgtttgtactctatttttgatacgacaacggtggatgtacttagtttttgaatacaaagtaattgatcaggtgttcctaatctatggaaacctagacttattactggtgtggacgtatacggtataagtagatatggatgatttatcagcttcatttgattgagggaaaaatccaaaacaaaactcaaatttgatttctttgatgaaactataacagtttcggtatctttcataattatcgtctgcaaagacattgatgtatcactttcattgaaaaaatgtttccatgcaacacatcttttaaaccctaagctaacatctatgataattatttctttagttgtcaaaaggtaaaaatattttggatcgattgcactccgtactaaatcaagcaacctagaccacgttcctgaacatattctacagaagagtttttctggttttacatcatcttcatcttcgttaaaattttcatatccatccatttggtcataattcatatgatttattctatattcatggagttggaatcgtgaaagtaaaatcaaacggtgttcatttatccacaccgtttttttgtagttagacaaatcaactggatcataaaatgaatgaaagttcaagttaagtttggcaaatgtaattttctttgaacttctgtctccacgaaaaacagaaaatttaccaacacagtcaacaattgctatcatcaacttattatccgttactaatagtgatgcatgagatagaaaagcccatttttcagttttctcaaaatgaaatagtttagaaagcttgaatgtcttattaaagtaaaatttgaggacatacacagactgggaggttcgaactaaaaataaacttgtagagtcatcaactatatttgactgtatttgttgaatttcatcagggaaagtcaatgatttaagagaggtaaactttaatggtttgtgttgagttgtagattgtttgttaagtttctgtgttatatcgtccacaaaaccaattgccaaaacattattatatcgtcctaaatttgttgctattatatttttatcttgtagttttattattgctgtggtgttgtgaacagttggatctaatgtggtttttaaaattttttcatctgtggattcaagcataaacttactagatcctacaatatattgtgatctttttgattcttgctctccttgccccataaatttgagctcaagtgctgggtcccatattttctttgtacttttccttataaattgaagtcgatgcccaacatttgaagagatatccgttgggaaattaaaattaattgaatgatttgcatctttgtcaagcttgacatcgatattggcaatggttgatgttccaaaagattcagaaatccctaaatctgaagcatggggtagcatgaaaagttcatatactgcagttgtgtttaattgctttatttatatatcagatgaaactagattatgttttgttaaaaagtaaaaatgtaaacacaaaaaaattattttgagatagatccgtttcaatttttttttgatttcttacaaatattaatcatcttttctttctcttaattacaatcatatgttgaggcaataaatgacacagacagatggacacgactgaattggatctacgaaccacaatctcaatatggtttgtcttgttgactgcctttacgggtggctttattcaattcattaatagtagaaagccttaacgaatatctatttttgtaaatataaagatgtttagctattttgatgaaattattttttaaaaaaaatatacagtcacacaatctttcaaatttatttataaggttttgcatctgaaggtacataatatgtcacacatgatctatttacttgcatcatcaaatgattcgaaacgtaaatcccaatttatctttggacctaatttaggtagtacttcagcaacactttgaacatctttatcacctctaccagagacagtaataataacattttgatctttactcatcttctttgcagcttgaacagcaccataaatagcatgtgaagattctaatgcaggaataataccttcatattgtgaaagaagtctaaaaccttctaaagcttgatcatcagtaactgcaataaaatcaactctaccagaatctttccatgcagctaattctggaccaacaccaggataatccaaaccagcagaaactgagtgagtatcatgaacttgaccatcatttgattgtaaaacatatgtcttaacaccatggaagacacccggttcaccagctgttaatgtagcagaatgataatcagtatcgacaccactaccaccagcctcacaacctaacaatttgactgataaatcattttcaaatggtgaaaatgtaccggttgagttagaaccaccaccaacgcaggcaacaaccagatcaggtaatttaccatcatttttttccttaaattgttgtttcatttcattaccaataacgcattggaaagttctgactaaagttggatatggatgaggaccaattgctgaaccaacaacataataagttgattttaagttgacaacccaagatctaaaagcttcagaagttgcatctcttaaagttttagtaccattttcaactgcaacaacattagcacctaaaattctcattctgaaaacattaagagcttgtcttctaacatcttcagcacccatataaacggtacaagtcataccaaacttagcacaggcagtagcagttgcaacaccatgttgacctgcacctgtttctgcaataatgtttttcttacccaatcttttagcaataaggatttgagctaaagcattattgattttgtgagaaccagtgtgattaagatcttctctctttaaccaaattttagcaccacctgcatattcagttaatctttcagcttcatgcaaggatgatggtctaccgatataatcatataaagcacggaattcttcccagaaagttggatcagcaatggctgcttcaaatgcatcttctaattctcttaaacatgcatataaagcttctggaacatattgaccaccgaaggcaccaaaatttggattatgaagatgtttttcatcgaaagctggtttatcattaaggttaacttcattagagattttagaatcggaaacggtattatcaccatctccattaagaatagagtgaacatagtttttagcagcttcacctctttgaccagtcggtgcactttcaattaagttcaagattttggaaccaatgacaacaccatcagaactcttaccaacatttaagtaatgttctctagtggagacaccaaaaccgactgcaataggggtattaccggtgaattttctaacacgagcacataattcaccaacagaggaagagactgaaacaccagcaccagttgtacccattcttgagacaacatatatgaatgaatctgcaatttcagataaaatttgtaatctatcatcagtagttgaaggagcaacaagaggaacatatgaaagggtatatttagagcaaagatttctgaatttaacagcttcttgaggaggtaaatcaacaacaataaaaccattagcaccaacctcttgagaagccttaacaaattcttcttcgccatatttaagtattggattatagtaacccattaagacaatagggatggtaacaccttgatttctagcttctttaactaaatttaaacatttagtgacagtacaaccattttcgatagctttggtattagcagcttgaatagtaggaccatctgcaattggatctgagaatggaataccaagttcaataacatcagcaccaccatcttgtaaacctttaaggattggaattgtatcttgttcttcagggaagtatgcggtaacgaaagttaccagtgcatttcttccttcatttttagccttgacaaatgcgtttcttaaatcagcagacattgtttttttgtgatatgaaaaagagttaaatagattatataccactaaacaaagaaaggaatataaaaataataaatcaaccattaataattgaaatttcagtaagaaacggttttcacacttaagatgtttttcgcccaacagtcggggtgagtcactgtgatgggtaagaaatggacagggctgggtaaaatatatggaatattagtggggactgcccagtgctttgatgggggaaaacctcctctcgcaaatgtcacgtcgatgagacgaccgggtggctcgttattgtagtaccagaatctggattgataccctgtttgatcttgaagtaccgtatcactggtcttattttagcataggaatctttgaactggctcatttcttgttgtaattgaaccagcttttcacctaaactaatagcaacctttgatgaacttttatcttcactaagagatgataactcttgtaaaacttcatgcatttccgcccgtattctaccaagtgattccataagcaaatctaatgccttagatactgcctctgaatcaactttaccctcctcaagatcggatatagatagtgtttgttgtagtgtctcagcgagcattgttttaaagaaacagaattagtaaggcaatagaaatttagattatgaaacgatgctcaagttctcatgtaatcataaacatgaaaatttcaacataaattttttcagcatggaaattttgttaaagcaagttttttattacccgattaggatactttatttcttaaattaataaaatacatcatgagattagcgtattttggatcagacacgttcagtattttatgcctgaaacgattgttaccattgaactcaaactttctacttgatattgtcacacgtcacccaaaaccgtcaggaagagggttactatcattaaaagatttaccgattgcagactttgctaatcggaataacatcaatcttctgcgtgttgactccgaagcagaatttgaagcaataaagggaaaatatgatttatgtattgctgtttcatatggtaaacttattccatccacatttttatcttcattaacatatggcggtttaaatgttcatccttcattattacccaaatattccggcccagctccattacatcgtgcattgctaaataatgattcaattactggtgtttcagtacaaacactacacccaacagaatttgataaaggtgacgtgttagccagagaagaatacacaattaaagaaaatgaaacattagattcattaacagaaaccttggctataatgggaggagacttattgaacaatatcgtcaaaaagtcactttttgataaatcaaatccaaattacagagtattaaaacctgatttaccattttcttatgctgcgaaattttcatctacagataaccaaattatatggaagaatgctacagttcaatcgattatgagaaaatatggagtattgcacaaactacatacctttaaaccatgtatacccaaaaagaaatcaactgccacaacaaaaagagttgttctaggaaatatccaaccaagttcatctcctcttgattcatcattacctaatggttcattccgtttgttagacgactctacattagagattaaggtttctgatggtttcataaaagttgatgagttgaaaactgaaggttttggatcagatacccctgcaaagtttatctcatctttgaagaaaaagtttaacaatactgataattactttatctaaaatctatttatttaacaatatacgaaagtaaacactaacacttaaattacaatgacataatacaatgattattatactcattcactgcaattgcaatcttcttatacaaaaatcttctatcctctctttctggaatgaacatctctttaatatcaattctgccaagtttattcgacttatatttgattttaataccttgtttatccaataaaacatcttcaatatcttcatatttaatttgccactcaagctccatttcgtaaatcttaaccatcaaaattcgagaataactaacaacacaaacttttcctccctcttgcaacttcaaatgtgctaaatatttatctctagagaattcaccattgttgacagttttcaaccaatattgaccttgtgattcctttttatcatatctgaccatagatccatcatatggaatatatctaggtaacctcatactttcagtacctttaccttcaaaagctgttgtggtacttttgatagtttcactaatattattagccatatctaaaacgcctgtagcagttttcgttggtaatcctaatatacctttacccagacctttaaaaaatccacttgcaccttctctcgtagccccttccataggtgccattgctaatccagtaataccactagagataccagtgaaaagtgattgtgcaccagcttgaattccatcaactggcctattcgtcttattatttgcttgcctgttgagtctacgtctttcttggaaatctttatccattgatgcaactgttaaaccttttgcaacagaatcagtaattctagaaacactatcacttacaccaaacactgatttcttaaaaaaacttaatccacctttggctagaccaatacctaattcttgtggtttatctgtcattatatatccttgatatggttcatagaaaatatccataacaccggagctaatattgttaaatagtccaacggggttaccaagaacatcagcggatcccaaaaccttatatatttgataaaggaaagcctgtttataatgttcagatatattctgaaacaaatatggaattggagtacgaatattctctaacattaatgcagataatctgacaggtgcattattgatattaccaattgccatagttaaaatatcagctgcaattgacaagttgttttgtgtatttttttgatcatcattgtaagaacggtcactacgaacaaatgaaatattgaattgtaatggttgtaagtgtagcaactcaaagtacaagtcatcagtggttctaatagtcggaggttctggaatttgtaaattcttatcccataaaatattttcaacttgagagttccaggctgccccaggaattttggaaaagtctaacatttcccataaaaagttttcatcaacttgaattgtcaattcttgtaataatacagtagcaaatttaatataattaacaccatgtgtagaatccttcaatcttgcaacagatgttgaaaataaaggatgagagttcaattcattactggtcttaggaacgacagtaggatacataacaacaggaaacatactagaatacagttgattgtcaagttgtaaccatttcatcttcaaacttgcattttgataaatatccgactcattatagtgaaattcgataccttttatagtcaagtaacataattctcttgtattttctttatctgtattaactaatgatataccaatgccttcaaaatcaaataataatgatgtataataattttcatctttataactagtttcaaattcatccttagcatcaattccatttaataaggatacactactatgagattttttgatttggtacatactagttttaggatcatactcagaaatcattaaagcttgaattggaccatctgcaataacatttaaatcaaatattttacttgtaccatcttcctttttgactctcataggcatcaaagaaccaatttccgccagttgaatatatctttctcttttgccacatctcagaatcaactctttaacttcagcagctgggaaatcccatgcatatggcataacactctttggtggaattttgtagaaaacaggttcaaatctacggtcactggtcttattaccatctttgtcaatataaggatctgcttggtaaacaaaaaattcttggtcactaaaatttctaagagaatatggccacatattttgtgcatcaacgatgttaataaaaatagtagcattttcagtattgataacaactcttagtaacatatgagcattggaatcaatctttttaactctcaaatatatttcaccaacattattgactataaatggtgctgacatactttccttaccttctttaaatccaacttgtaactgtttgtcaccgtatgttggaatttcaaaaattggggaaatagattgtgaggcgacagttattttattttcacctgtaacataaccaatgacaaccggtaattgcaaatcgtttctaatgacataacgtggggtgacaataataactttggataatttgtagatacctttaccttcggtgatatggataccaatatcagactcatggtttttagttttcagaccaactctaacttcaaaggattgaccaattttatcaatactaaaaccatcactaggataagaatcttctaatttaagttgaactgtattttttaaactacctttgaagataccaaaagcttcgtcttcaataccaaaagaaaacatatcaggatactcagcttcattgacctcctcaatagttcttttctttgagactaaagtattaaaattatctataatgtaaagatctctttctgttctattgacaaaaatgtaaggtgaataaattgaaactttagttccatatttaggatcgtacgaataacataatttcaaactcaatctttgaccatcagaacttttcagattgatttccctatcaacagttgagatactatttggtgtattgataatcgaagcaccagaaacggcatatttagatcccaaaattaaaattttcaaaacagcactgaaattcatatcaacaacatggataggacacgtctcaccttgtttcaaaacatcattccatttagtaggacctttttggaaaagtcgccactcaatatcaaaaggtaataaattctcaagaactaaaggtggtgaaatcattatattcatatgtggatataattggttaagaacatcgtctttatcataaacagcatgtgctttaaaataatagaaatcggcaaccccatcagcttccgcccttgaacattctaacaaaatatcgttatctctaatagtctcccatttaaagtcagtcaaagaatcatcaccgactaatctagcagctgaccagccgaaaatttcacttgtagttgatggtctaacagccaacctaccattatagacaaaatcaataggtaaagctaatttaccaccaggtggaataactatctctctgtctattgctaattgtccttgatcatttcctataccaacatgaatagcagtcggtgtgaaattttcaatagaaatagtggatttaataacaacttctttaactttgtcttcagcaagtgtaatttcatatgataatctattatgatacccctcatctaattcaggttctaacatcgcaacattatcaccttcagttcttaatgataacatacggagcgggcgatactttgtatcaagaatttgaacaccaataaaatgaatattagtattaattgccaaactttgacgaacaacagcccaatcttcaaacgaccatggaacagtttctaaatttttgatgagagtttcttgacgtctattagatttgtcttcattttcatcttcggcatcatcagcatcatcaatccaaatcttaatatcgtgaccagtttgattaataattctaaaaggagaatcttcaccacgttccttaagttcaccttgttcagaaagtaaattaacaaaatgtgaaatagttgcaattgatctggaagtaattgtaaattcagcattttttctagaaacaaaattaacgctaagtttatcatctgttgatctttcggcatgtacagcaaaataccatggatctaataacggttcccattgtgataacgaatagttaaaaatattaattaatgaattaatttgtgtgtcagcttctaattcagttgaccaattacgtgcattgagctcaaatggtttaacatcaaaatctaaaattggtaattcatgaacatcaccgattaataccattctgaaaccttcaattttaatttttaatttttcagcttttatgatcataacaggttgaatatttctggatttccttctttgatgtgataatttggaaattgatgaaatgatagatggtgcatatttagaaatctttttactgatatcattcaatggattttcaataccttcagattctaataaatctgtttgttctttatacatcactgaagccttattgaaaatatggagagcaaggtaaatatcacgcagtgataatcttaacaataacggttgaattgttgaatcaatagttgttaagaaagaggttgcattagaaccacggggatcaatattaaggttaaatgaaaaatcatccaaaattcttaacttattattcatctctgatgacattttctgtaagaacattccaataccaacggctttaatttcagtaatatcacctagatttaataataattgacttactttaaaaattacagcatctgaatcttccttttccggattagccaataaaacaactgatggatcaacaatattaatcttataatttgtttttgtctctgatggaacactattttcttcttcatcttttttcttgtttatttcagcaattgatttatattcatcttccaaattttcatcaattgtttgatgatgtttcatataatcatcaacaaccaatttaggttgttgaattgcaaaatcgacaaacgatttaattgaaaataaataatcaagagctaaaattaattgagggctatcaattgcaacatcaatatcggttacaccattgattgattggatattactcataaattgatagttagagtgaatagcttctggaataatatctttgaaaacattagtactacctgatcttacatctttaacaacaaatgatttaatatgggaatctgatttaaaatcgccattatcaaacaattgaaacttaatacctaactcagtcaatgtaaattgtgataattttttatctgaaatatcaacaatatgacaagtgtcattgaataaacttaaacctaatgtcggaacattaaatgataaatcaactgtgacttttttaggtacttcttcttccattacttcatctgtagtttcactattagagttcacatatgtttcatcattagcattataaccaatagttgattcatcactttgttgtgtggttggagcttcatctgttttattactttctgaagatttagtaactgcaatcattttatttgcattatcagcttctaattcaatttcttcaacatctgtatcatctatatcaacattattgaaaattctggggaaactttgaaaaatttgaataaaactaaaagtttgaaattctgttaatttaatgtcattaccgagtaaatcgccattaacaattattgaaggacgtttaattttatcaccttcataataattgatatcaaaattaatatctaacttatcaataatttctaaattttgcttctcagatccattaacaacaaaacttgataaaatttttgtattactcaaaccagctgaaattaaattaaaatattcatcatttgtttcggttttaataaaatcgttagatgtatgaatttcaccaagattaactgttatagtatcaaacaaattattaaccggatcaacagattttggaaaaacaaaaataggtgcacgaatcaaaacatcaaatttcaatgtatttgaatattcaacattacttgcttgatttaatgcagcttctctagcagtatcataaatatatttcattctttggaattggcaaataaattgataaattctggaaaatgaatcttcaacaaacataacaaccattgatctagtttcaaatttaaattgtgaactatatggtaatgtattagtctctggatcaaaagtttcataatataaatcagctaaatcatcaccttgaatactaattaatttacgtccattgtaattatcgttatcaatcaaagttaaaccaccaatttttgcattaactttcatgctatcaggtaaaatgaaaagtccaacatctgctttatctaaaactaatgtggctaatttaataccatcatcatttaaaatcatatgaatactttgcatattaatatcaacattgatatgaacaggtgaattaacggtttcttcttcattatgacgtaatttatcagaaggtaactccggagctaatggatcagtaaatgtatttaatgaataattaagtaatgttaataaagtttttctagtaataacaacttggaaatcagatatatccaatttaatatcctgatcaaaacattcaatagtttcacctttaaataatgcaagtcttcttgttctggtataattaacaacaaataaattatctgatttagcatcatcattagattttgattttgacctatttttagatctggatcttgaaccaactaatttcttaaattctttaacgttggagctttcaatatgatctttaacagataaatcagctaataataaatcaacgtgcagttctctctcagtactgaaaaagtgataattgtaatttttcaccaactaaatccactaatttttcagattcaaaagttatggtatttgaacatctttttaatgatacaaccattaaatccattgtaaaatcaaaaacaatcgatttttgattcaatgctggtgataaagtatcaattgaggtagtcatatttgaatcatcaactatggatgttgtttctgatccagggggttcataattaatttcatttttattatcattattacttggtaaaaatgcataagcatcagaaaatacatctttgtcatcatcaggcgaatcatttacattagcggttccatttttgtttgctgttcgttatattagcgctattggtatctttatcaaaatttggaattgaactatctaataaatctaagaatattttatattgataatcatttaacattgcaataaatcttggaacatcggccttaactctcattttcggtaaatcatagaatgatgggataattgataattcaatcaaaaaattaacatttaactgatctaatattaatgaaggtttaggtccagaagtatgcaattgatcaatagttgatttgaatatttggtccaattaaaatttgtgcatcctctaataaaatattatacttatcatacatgaatgaattcaatctattccaatcatttgatgtataattttctttattttcatttttaatttcttcatatttagaaggactaattaattcacttgcaatactaatatgacctgcatctaatataccaattggagaatcccatttagttggatctaatggtaaaattattaaaggagcttgcaaatccatttgacagttcattgttttatgttcctcaaaggcatattgtaaaccaattttggtttgtttagtaaaatcttgaatagttgattcagcagcattcataattgagccaattgtatctttatgagcagttggaggtttaaaaaattcataaattgattcaataaaattggtattatggaaaatagtcatactactcaatttaacaattagttcagagtcagcaattttagacaaaggattttgttcatacgatagatgaaagaaaggtttttcaattttatcattttcaagatctatattaatacattgagtttcattactatcattatcatcatcaatttccattgaatgatcaatgtaatcattattatttggtttattatcagtgataatttctttgacattaacaatatgtttataaagagtattgcttgaaccatcttcaactaataatttgagtaaattaaagctaacaaaataagaatcttttctttgaaggaaatccatttgacaaccttgggatatgaattcagccagatttttagaatttttatcagatctaattataaaagaacctttatgtaatttacaattaattgaaaatttaactctttctcttggtatatcgattgaatcagataaaactttagattcatcaaattcaattgcatcataaaattcattaatttgttcattcgttatttgaatattgtttgtattttcagagttactattagattcagtattttcatttgatgatccccaccaagatgaaaaccaacctttattttgattattattggtattagttgtagaatttgaaccagaagaacttggtataatcttatgttcctttttaaattgaattttagccaaagatctataaaatcttaaatcatcaaattcacaatcatcttctaattttttcaattctagtattttcttcctatagttaaagattttttatctaataaatattttttccataatttaatgtaagcttttctttgatctcttctaattttcaaataatcccaagtttttttataatttttatcagtgaatttcattataaacagtttggaaagaatattgtaaccattttaaaggatcttcattaattgaacattttggagcattaattttgaatttggaagttttcatgaaataattcatttcagttgttgtatcaagtatatttgtatattgtaaacgattaagattgattctaaattgatcaaaaaataattttaaatcataatgaggagaattttcagttggacctaatttatttaaagttaaatgacctttaccagagacgggttgtaaaatatattcaacattttgagaattattatttgaagctaattgaatataatcttttaaattttgtaacattttatctttatcatttgacactagggaagttgatttattaattgaagtatctaaataaattgttaaagattttaataacattaattttcttgacatattacttatattttcaataaaattagtaacccaattttcatcagtacttacagcagataattcatcaagagttataccgaaagaataaggtaatttagtataacaatcgaaatcttcatatctaacatgaatatttttaattgtaatttgtaaattatcaataattttagagataagagattcagtgaatgtagattgagatttattattattattattattattatattattatttggatttaaatcatcaattatatcattattttctgaaattaatttctaaatcttttaatttttgtcttttagcatttaattttttctctaattcttcttttaaattaaaatttgaaggtaatttagcagaggctaagataaaacaattttcaattaaaattttaacaggttttgattttaaatttgaccaaggaatttgcattgttaaagtacctaaatgaccacaatttagattaattggtaaatttaatttatctaaagattcagactttaattttaaatttttcaatgtaacatctcctgaccaaataccaatatttaattgatttggatcaaaattttctacataagccccaagggttttatttaaaatgcttgccacaagcgattctaacattgataattgagtttaggtgttaattgtgggttagaatgcttatttaattgagtcaattgatgtcaaaaagaaagaaagaaaggtatgtgtatgtgtatatcaacagggaagggcaatttattaatttacttacattgcaatatttaaatattacatcatgatacatactataattatgagcctccaattaaaaatataaaaaaatgaaaaataaaaaaaaccaaacagacgcgactatattaaaaaatgctgacataatcaagaaaataaataaatcactgatctgatcccaataaatcagcatagtaaacaaacaaaacaatttaagaaaaacaaaaacaataataaaagggctaaaacccagcacaattaataagcgcgcgcctccttttcaccattttaaccaattaaatcacttaaactattattatttattattatttattattatttacgtggcgttgtttaaaaaatttgcattttctattgtttactgtttatatttagaaatatcgtgtttcacccttaaattcctattttatcctatttcatttccatattttcacttaattacttctttgatttactaatatccactcaactcatctcttttcatatcttttcttttctttatttttgttttcatttcgtataaccttcttcttcttcttctcttttaactcccttcatttagtatacaatttataatgagatttagtaccttattatcctcactcgctttagtagctacttcattagctgcaacggatgaacaagatacaacttctttacaagcttccttacaaacaactacttctatcaaagttgcttcaggttgttcctttagagatactttcactgcaactgctcaatcagatttagatagaatcgcaggttgtgaagcagttcaaggtgatattgtcattacaggtgatttaggttctgcttcaatcgctaatgttaaggcaatttatggtgatttacaaattttcaatgcaacaaatttagaatttttcgctgctgatgcaattacaacaattactggttctttaaaattacatggtttaactgtcctttcaactctttcattcggttctttaaataatgttggtgctattaattgggttactttaccaaatttagttgaaactggtttaactcaagttactgattgtaattccatttatatctcagatactatgttatctgatttaaatggtattaatccaagtaatgttgaaattttcaatattaataataactttaatttagcttcaatctcttcaaatattcaaactgtttcaaatgctttatctattggtttcaatggtgatgataccgttgttgaatttgaagatttagtttgggctaataatttaactttctattcagttgcttcaatctcaatgccaaatttagttgcaattaataaatctgctggtttctttgaatcatctgttcaagaattaaacttcccattagttgatttaattggttctgatttaactattgaaaataacaactatttatcttacattgatttctctaatgttaccgcaattggtggtggtttagttattgttaataatactgatttaacttcaattgataatgttgataaaattaagacagttcaaggtgctgttgtcttaaagggtgattttgataattgtactatgtcttctttaagaactgttagaggtgctttcgatttagaaacttcaggttatgctgattgtgatccattcaaaaaattatcaaagaatggtggtattcaaggtgaatttaaatgtaaggcaaaatcaaagccttcatcttcaacttcaaaatcatcttcaactgattctgaatcttcaactaagactagagattcaacttcaacttcatcatctgatgatgattcaaattcatcttctgctactaataccgtttcatcaatctcttcaacaagtagaggtggtgcagcttcattaaagaatacttcaatctttggtactatggcagcaatcttattatctttattataattttgttaaattaagattaagataatttgtttacttcaatcgcatattttatcatatcataataatgttaatattttttttattacccaaatcacaattctttcttttcattctgtaatttttcattcatttttctttttaaataacatttataactaactataactataactgacaaaattttactaataaaaatcaattaattttataaattataaaaagaaaaaaaatatattatgctactatacgtttataaaccttttccgtaattaccactttcgaaaaacttcataattacatcaacaatttcttctaaacctgcaacccagtcttctaattgttcattaactttatttaaatcatcacctaatttaacaaacaaatcttttctatatggacatgctttcatagctaatttgaatactggtctaattaacattgaatgatattttgttaatgtttcactataagatttttcaaaacatttacttaattcccaatctttattatcaatacattttctcattgcatttgcagtaaattgtaatcctctacataaccaaagtaatccttgagttgcaacttttttaccattttccttaatttctaataaaattaatttttgcaatgtattacaattaattggatctgataaaaattttgttgaaactttattaatattacctttcatatcattttgaacaacactaaatgctgatgatccaaataaatcaaataatttaactaatgattctgatgcttctaaaaattcaagtgtggaaatttcaccttcaggacgtggaatatccttaaaagttgtcttcatttcatcgaaaaatgtcatattgttcttatttagtctagcaatggcttatttaagctaagataacttcaaaagaaaagaacccacacataaaagcaaacaaacacctgtctttaaaactttatcattgaatcatgttatcgtgaaaattgctgaaaaaaaatcgcgtttcttttgttgtggtctagtttcatcgatttgttgactttgatatattaaatcgatgttacttataaactataaacttaattataaactatattataaacaattaaagaccaagttcctttgctaaaacctttaatctaatcttttcagagaatgtaagtttttccttattctttaatttttcatattctaattttcttggatctgatgcctttgctgcctctgctcttgccttagctgcttcctctctagccttagctgcctctgctctaattctttcagcttcctctctagcctttgcagctgcaatttctctttcttctgcttccttctttgcctttgcttcagcttcttgtttcttaatattatcataatattcttgtttcttctttgcaataaattcttcaattctagcttgtttttcagcttcaaataattctttagcctttctcttctttgcttcaatttcttctttgcctaatttctttaactgttcattatattcagtaaatgcaggaacaaaacgtgataatctttccttaacttgtaataatttttcatgagaaattttagattgttcaatatgtttttcctttaataaattatattgttctaattgtttattaacatcttcatcaatttctttctttaaaattggaatttcataaactctttccgctctttcaatataatccattctcttgaaaattgcattactttgttcttcaagtttttgagtttgttcctcaagtttttgataactatattgacgaatctcatcttctgtcatattcttaacatcatcaaatttaatttcaattacaccacgtgaattaatatctttaacaatattcttcttatttgccaaatcgatttcttttcttgttttttcaattctttctttttcatgtttttcagcttcttgtttaatacgttcttcttcattacgtttttgttttaataattcttcagccttttgtttctctaattgagcagcttcttctttctttaatgttgctaattcaatttcacgttgtttaattaattcagcagtatgtaaaatattttgtttttcaacttcaaatgtttcatttgcattcttaattaatttttcatttaattgttcctttgctaatttaatttgatcaaaattaataatattaacagcagttgtaagagctttttgtaaatcatataaacgtgaattaattgatgatgtagttgatgatgaataaattttatcattaaaattaacaacacctgcttcatcatcgagttcaacttcacatttaattaaattagaatattcaccagaaactaataaatcttcaaattcaaattcattataattgaaaatttctgtattatatgaagaaagtttatggaagaaatcaaatttaattgaatcgtataaggttgaaatttttgaaataattttagtaatgaaaacttcctttaatggttgaataaatgaagtaaatttatcattgtttgaaattttaactaaaatattttcaacatttgaatggaaagttaatggattaaaagatttttcaattaaattatataatttaacaatatcttcatcagcatattttaaaacaatattcagaacatttgaatttaataaagaatcacgagttggagtttgatttaagtttaataaattagataatttattattctttctcttataaaattcagcatctgttaaaccagtttgagttgagaatgaatttttgaaagaatctaaaattggaattgataataaagttaataaataaatagttgcattatcttttaattcatcatcagtgataattggagatttaattaataattggaaaattttttgtcttgcagctgaagcataagcataatcatttgaaacttggaaaattttagctaaattattataataattaattaaagcaactggttttggagatcttttagaatatttcattaaaccatgaacatcttcaatacttttaaaagattctttccataattctaatttaaccgcagtatttaattgttgaaatctaacatctaaaaatttttgtaaagtatcaggttttgataaattaattgaatcttcataataatcacctttattaattgataaaagatgagttttcaataattcacaaagtctcttaaattctgattttctatcatatttaatacaaaattgaaatgcttgtaatgaaacttgacaataggaagtttctaatttagaattatttcttaataattctaaaacagttctataacattcccaaacaaattttaaccaaggaaggaaaaattctttatttgatctttcaacactatcatcagttgtaactgaagataataagatattttctggtgaaatttcaaaattaattgcatcttcatcatcagattcatcaatatcgacattatcattaatatctttatcttcatcatcatcttcatcatcaacacgattataaactaatttagaagcagcagcagctgaagctattgatttttcaattgcaatttcagcagcatcatttgcttctaattgagcatcatttaattttaaatttgcagtttgtaaaaggaacttagttaaattttctaaattttcataaccaattgaagaagttaaaccttgaatcattttcttatattgatagagagcatccttaatatctttagtgaatcttttattaattgcaagtttaataaataatttaaaaatatccaataattgaggagttgttggatcaatatgttttgctctctttgagataataaaattatacagtttttgtaaagcaacatctggttgatcgatagcaatcagatcttcagcacgtctaaggacattttcaggacgacctgcttgataagacatggtttggggtgtgttaaaaaggaagtattctatgaaataaacctactccttcaccaaaagtgaaaaattggagatattcctctctcataataaaaaaatttttcaatttcaaaaagtgagtgagatattattattattattattattattattattattatcgacttatagtcttattactattacttctattactattactattactattagttttatacttctatatctttcaaagatgatgatgatacatcaagtatattaataattataaataaatagagttaatttaataaattaagtaaatgtaaacatcatcataagcgtgctagttaatcatgcattttgataacagctctgatacaatcaccatcatgcatatcatggaatgcttgattaattttacttaatggatgtctatgagttataaattcatcaacctttaatttaccatcaacatatttatcaactaaagctggcatttgacttctacctttaacaccaccaaatgcacaacctttccaaactctacctgtaactaattggaatggtctagttgaaatttctttaccagcagctgcaacaccaataataattgattcaccccaacctttatgacatgcctctaatgcatttctcataacatgaacattaccagtacaatcaaatgtataatctaatccaccatctgtcatttcaactaatttagaaacaattgtttcaccttcctttaaatcagttgttggattaataaaatcagttgcaccgaattttgatgcccattctttctttttatcattaatatcaattgcaataattttagaagctttactttcaactgcaccttgaataactgataaaccaatacatccaataccgaaaactgcaactgtatcaccttcttgaactttagcagtattaacagctgcaccataaccagttgtaataccacaacctaaaagacatgttctatccattggagccttttcatcaactgcaacaactgaaatatctgcaacaacagtatattgagcaaatgatgaacaacccatataatgaaataatttttcacctttacaggtaaatcttgatgaaccatcaggcattaaacctttaccttgagttgatctaattttaccacataaattagttttaccagatttacagaatttacattcaccacattcaggtgtatataaaaggacgacatgatcaccaactttaacatttgtaacaccttcaccaattgattcaacaatacctgcaccttcatgaccaaaaacaactgggaaaacaccttcagaatcttgacctgataaagtataagcatcagtatgacaaacaccagtgtagtcaactttaactctaacttcatgagcttttggagcttcaacttcaattgtttcaattgataaatcagtatttggagcccaagcaactgctgcttgacatgtaattgtctgtaaaaaaaaatgtgaaagtgttagtatttattcaattaataatagttataataattatatacatactttaccttcagtagacatagttatagatgttaatagagaatatacaagtaaaagaaagggagaaataaagaaacctggaaagaaatctgggttttatataaagaaataagataattaataagataaaacaaaaaaaaatactctattaagcataaatttacttattcgcttctaatagcccaatcgggttatctgatcctctccggaaatttttcatattatgtgtatggataggggctcaactactgtttataggagttatgcttaataataattataataacttatacttacaatacttaatctttatgacttatctgttgtaccataaaatctttaataaatggtacattatttaatacattaacaccaaaacttctagcccaaacaattggtgtaaaatcagttgaataaattttatgtattttatcaacaattccaagcattacatgatttggtaaatatctatctgaccagtatggttctaatgcaattttactaccaatatctaatcctctcatatatgatttttctaatgtctcaactaaacttttaacatctgcttgtcccatatttaatccttgtccagctaatggattagttgtatgtgctgcatctccaactaatgcaacttctatcttcaatatatgaatctgcattacttaattttaatggaaatttaggctcttgaatttggtacaataaattcaatttctaatggataatcttcactattatttgttggtttattattgaaaatctctaatctccatttaatttcatcaattaatttatctgaatcattatctgctatttgataaagatattttaattcaccttctgataattttgcagctgcattaatcataaatttaaattgttcatcatttaatttatttaatatattggaaatttcaggtggtacagaccaaactaaactacaccaattatttggtaatggtaataatgctaatgtacctgttgttaaaaatctttgccaacctgttgataatctaatttcattatccctatatttacatgttgcaacattaccccatctattatatgaccaacctcttgattcaatttgtgcaaatttacgtactggtgaattatatccatcacatccaattaataatcttgtcttaattttatccccattacttaattctaaaattggccattcactatgtggatcttcttcaattttaacaacttttgtattatcaagtaatattaattcattttctgtactctcattattaacccttttgatattttgataaagcatcgattgaatattaatattttcaatcattgttgcaagttcaggtgaatcaaattccattttagcacctgatatactatcataagtatgaatattatcataagtttcaattctatcatgtttaacataatcccaaccgccaattttcttcaaaaaatccattgatgttggtgttatactaacaactcttttatcaatatattctggtggattatcataataactttctaaactatcaattaatttattaccttcaattaaagtacattttaaatcttttaaaattggtgatgtcttaattgctgatgctaaacttaaccctgcaggtcctcctcctataataacaatatcattggttgttgtcactacactattccaattccttgcagtactactcaaataccttctaaacattcttgtcccaatgaaaagaaagcagttataaaacataataatagacatgacatgaggttaactattatcgcggtgttaaagattttcaataaaaataatttttcactttctgaaagttaattcattaaatctactttatctttgatctactttattaactattggagattagtaaccacatctctacttattaaaactgttttcatccaatagaataccgtatttggtaagaaattacacttcatctttattttcatctttttctttatcttcaccttcattttcattttcatctttacgtaccttatcatcaatgtcaaataaagattgtgttataattgaaaatttgaaatataatgctaaaattaataatcaaataattaataacttattaattacaagtatttttcatactaattttgataatgcaagttcaaatgatgatttaaaatattcaattaattatgctgtcgtttcaagaaattttaaagattatgaaaaaaataataaatcaataaattatccttcatttattcagttaggatattcattaataaatgatgtattattaaaggaacattgtgatgttgcaactattaaaatagaaaatacttaccctaatttccaaacggaactagtattaaagaatgataaccatgctgatattaatgatgagttacattttaagaatttatcattagatgcaattattggtattttcacatttgaaagattcaaaagacaaccgattaaattagatattgatattgaaactaaattcaataggaaacttgatacttataatttagaaactattggtaatgaaattatcaagtatttacaaaattcaaattttaaaactgttgaagctttagtacttaatgtgaataaattagttttcaaatttttaccaaatactattaattgtgatgttaaagtactgaaaactgatattatagaatatgctgatgttggtgtttcaacatttaaaacaaataaagatattgcaaatattggtactgaaataatcaaatttaatgaaaatgatgtaactattgatgaattttcattacctaaaatgggaaccattgatggtaattttaaagatggtaaatttcatgaagtttatttatcatttggatcaaatcaaggtaatcaattaagtaatataaatgaagcaataaatcaattgaaaaataataatgaaattaaagtattacaaacatcttcattatatagatcaaaaccaatgtattatcttaatcaacctgattttattaatggatgtttgaaaataagcacaagtttaagtccgcaggaactacttaaatatttaaaatttattgaatataatttattgaaaagggttaaagaatttaataatggaccaagaagtattgatttagatattttattgtatgatgaaatgataattaatgatgaaaatttaaatatacctcatattaatatgattgaaagaacttttgtacttataccattaagtgaaatattaccatcaactttcattcatccagttacaactgaaccaattggtgatcatctaattcaattattgaaaagtgaaagtaacatatcaattcaagaatctaataaattaatttcattaataccactaccaaatattaaagatgatgaaaatttcagatatttagaatatgatttaataaataatcaaacagccaacacaattaatgtcaatacttaatataaccccagactcctttagtgatggttctaaagaaaatttaaatatcattaaagttatggaaaaagttgatgaaatggttcaaaataatgttgatataattgatattggaggattgttcaacaagaccaggtagtgaacaaccaagtgtagagattgaattatcaagaatattaccaattattaaagaaattaaggataaatatggtaatgaagtaattataagtattgatacatatagaagtgaagttgctgaagctgcaattaaattaggtgcagatataattaatgatataagtggtggtacatttgatgataaaatgtatgaaataattgctaaatataatgtaccatatgttattaatcatacaaggggtaatattaagacaatgaatgaattaaatgattatagtaagacagaagatgatgaagtgattatattgaataatgaaattgaagttgatgaagataatatagtaatcaatgaaatttctaaggaattaagtaaattactgagtaagatgtattctaaaggtattaaaagatggcaaattatacttgatccaggattaggatttgctaaaaagttaaaggaaaatttaagtataattaggaaattaccaattatgaaaaattatcaacaattgaatattaaaagtaatgaatttattagttttaaatatttaccaattttattaggaccttcacgtaagaaatttattggtacaattactaaaagggagacagcaaatgagagaattaatggtacgagtgcatcaattactgcatgtattggatttggtagtgatattgttagagttcatgattttaaagaaatgaaagatgtttgtcttatgggagatgcaatttataaaaaacttatataatatataaatttataatatgtatctatttaattacattacattaatttaatttggacaatctcttgaaagatgaccttcttcattacaattataacaagtttttggagcaggatttgaagtacattcctttgagacatgaccagttaaaccacaattataacattttggaccagcagcttgacaatctcttgcataatgatttgcaccaccacatctatgacaagataatgatttatttgatctacaatcttttgcaatatgaccaaatttaccacaagtaaaacatttttgacttgaaccactatgatgagtagtaacaggttttggacattcagattgaacatgaccaatttctttacaattataacattgtttttgaattgtttgctttggtaatggacaatcctttgattcatgatttggttgtttacaattataacataatctttcactttgatcacaatcttcagccttatgacctgataaaccacatttaaaacaagttcttggataacctgacatctttattatatatacctttattgtcccttaaaaagaagcttaaaaagagttatatcaaggttaatatcattaatgaaaaattttccactttaaacaagtcttctctatataaaatacgcgataattacttaattaagaaacgataacacaccttcattatcagattctgatgataattctgatgataagtctgatgaaaagtctgtattgatgggtattatactctcctctattggtatacgattggtaatatagacaccgtattcattggtatcctccatttcatcatatatatcatccatatccttcaatttacagatatctttgataatcattgcaattacttcaggtacaataataaactgtataaatttattaattgtccaaaatttaataatttcactacttttagataatttattaataataccacctacctttttattattttcaattattttaccaatctggaaacctctaatagctccaatgaatccataatatttatttttaggtaaattatttaattcattatctctaattgttaataatggtgaatttttggctatcttctttgcttccatataaaaatatgatcctcttttaccattaagtatatctattatattatcttcatattttttaacaaatttttctaaatctttcattgatttgattaatttaatattcttctctatataaggtttggatttatggaatttatcagttatttctttgattttttcttcattattaatcaatccatctaatgatttgatttctttattctttttcttatgaaataactcaatttcattattactttcattatcatcagtacttaattctattatatttttattattattattactactagtattcggtatttcactaatatctctatcttttcgtttttttcaataaatcaatttctttcttaatctttgcagattgatcaattatatcatcaacattaaattctttcattataccatcattatcatcattattatcactattatcatttaaattaaaaattgatgatgatttataattattattattaattaatgatgtctcttcatgaatataaacatctcttttctgtttcttctttgatggagatgaattgggtttatttttacttttgtctaatgtatttaaaatattctttacttttttatatttacgttttggtattaaatcattattattattattattattattattataattactattatgaattggattttcaggtggtttaatagaactagataatgatgaatgtaatggtgatgaagacagactcttcatttccttattccacattgtactctatacgaatagactatagatagttaaagaagagaagtttcataaagagtttactactgcgtaaataatttttttcactatgtatgcacaggcgtttagtaaggttctttctttttgaagagtacaaggacaagacacaatggatactaaactaactaaatcattagagagatttaaggaaaggattgctaatggatcatattatgaagcacaacaaactattagatcaattactaatagatatatttttaagaaacaatttgatttagcaatttcattattatatcaaagtagtattattttaattaataataaacaatttgatgaaagtgctgatttatatttatatttaattgaagttttcgaaaaagagaataaagaatggaatgaatttgaaagaaatgatttaattaaattaattaatttaattaatatgttaccaaataatgatattaatttaattaatttgagtcgtgaaactaataaatttttaataaataagagtggtaaaattattggtgatgaaaaggttaattatttatttggtagtaaaatgattaaaagtggtgataagaatatgattaataatggagagaaattattaattttaaataataatgaaaatagtattaaattattaattgaatttgaatgggggtgttatttacaaaatggtgaatttaataaatatttagagagaattgttataccatatttaatgattaagaatattaaatttgctaagattgcaatgaatgaaatgattaataagtatgttgagagaaatggagataagattaaatatgaagaaattgaagggttgaaaattattaatggtgatgatgatgataataatggagaagtgattaattttattcaattattagttaaaatcttagaaagatttaataaagaggatagtaatagttttacaacattattgaaaagatataataatatgttaaatagggaaggtatatttgagaaaattaatgaaattgcaataagttattatgatatcagttttactaagaaacaaagtaatttattacaagatatgatgggtagttttcttaaatagtaaatagtatagtatagtatagtatattagtaaaaattgaaatattttttaattaattataaaataattatattagtatagtatagtatattatattatattataaaatgatgatagtgatagaaatgaatgaacaaacacacataagacttatcttaaacgtcttgcttctctttctgattccattaaacagaggatatcattttctctaactggacctttaacatttctgacaatagttcttgaagtatcatctaagaattcaactctaacttgagtgacaccacctcttgaaccggttctaccgagaactttaataactttagctaatgtaacaggggttttagagtccattatttgtatactttaataagataaatctaatagaaaatagttatgaaatgttaaactatctaactcttcaatccaatatagagtaaaagtgaaaaattattttcctcacagtgagaatgtcttcactagcttttttcagtgagcggtgctgtgcgtctctttttttctctttttgattcctagagcgggtaacttttacttatctcttataggtttatctctctttactattactgcaatgaaggtattagtgtttggtggtaatggattattaggtaaagctatctgtaatgcaggtagagaattaaagggttggcatatgggtgctatatctagaaatagtaatggtcctctaaggggtgatttattaaatcctgattcttatagagatattttaaaagattatgatgcagttattgataccgttggtatattattagagaataaaacttataaaaaatctttaagtggtgatttatcaacatttattactaatggtataccatcattatttaatccaatgaataaatcaattacttataatgatattaatagggatagtttaattaaattatctaatgaagtatccattcttgggaatacattaaataaagatataccattagtttatatatcagcacatagttgtccacctggtataccaaagggttatattacaagtaagagagaggcagaggattatatgattaaattaagtaatgaaaaaggtggtattagaccaattattattagacctggatttatgtatgatgcaaatgatgaaagtaatacaaggaaattgttgaaatcagttattggtagtgcatcaatgttcataaattgggtaccaccacctgtaagtactcaatcaattgcaattaaatgtattaatgcaattgatgataaccgttatcgcggtattatagtatagtgaagtatagtatataactctttctttatatttaagtaatgatatgatagtaagttcaggtaatgaagcaagggatcatttagctaatgaaaggactattttagcttatattagaacttcattaagtcttatacttttagcaattgttattgtacaaataaacattaattatagtaataatttatcatataaaccattaattataataattttcacattatcaattattatattgataataggtacaataagatatattagaattcaatatttattaaattccataactaatgatgtatttgagagtggtagttatcttatcatattgatattaatactattagttataataataataatgtacataatacacatcaacacgtgacaccgcagagggtatgccactaccaccccatatacactaaaccctgattactcttttaggaaaaccctcgcgcaatactccctctctctctctctcttttaaaatttctcactctctatagagatattactatcattattatattactatctactggaatttttaatacactctatattattacctctttcatttatcaatacaaaaatggtacgtataactatctatattacacccaatcatcaatagattataatactaacatacataattcttcttattattattcctacagggtaaagttcacggttcccttgccagagcaggtaaagttaagtctcaaactccaaaagttgataaacaagaaaagccaaagaaaccaaagggtagagcttacaagagattattgtacaccaacagatttgttaattctgctgttaccgttggtggtaagagaaaaatgaattcaaatgctaaataatttaatttaatttaatctgaatttataattattatattatattacatacataataaatactatacttaatcataagacatacatcatatattattaaatcacagtatctttaatactactctcaatattaataatctttattaatctattaatatacctttcacattcattaatttcatcattatcatcattatcattaattccattattataaaacctattttcaagtatcatctcctcttcattaccttcaactaaattacgtatcttacaccgaaatttacccttctctatattatattcattcctattcttatcctctttcttaacttcaatcattctttgtaaaaattgtcttattgtaaatggtggtgattcctcaaatctatctaatatttcaataactttatacccatcatccccttcatatttataaaattcttgtaaaattctattaaagatacgtataattttatcccttatctctacccaattactataattatgttcatttattaatacaattatactctcattattatcctcttcttcaattatactcttaattgtttcattcattataattataattataattattatatatactgtatattattactactgttacattaaaaactcatcactattctatacaaaaataaaattatttattcaccctcacttaattctttttcactatgattttttctaaacctaaatttacccttataagtattattaccaccaccattaccaccaccattataactattgtgattataataattataattataactattattactatttcttggactacgcggatatcttggtgaaattggactattttgtaaaagtaaattaccttcattatggaaatttgtactaaatctacttgatctacgtgatttattgttagtttgtttaattaattcaaatccgaaaactttatcaatatcttcattatcatcattcttcaaattatccccattattcataataattggtgtattcttattacttatatctttcttcttaatactaatattaatcttatcaattaaatcatcttcttctttattattattatctttcctactattaatactaatatcccttgaaatctttaatggttcaatatgcttaatatgtttaccatatttacccttttcttcaaaacttttattattaacattcataccattattattattaacactaccactactcaaactaatattcatactattttcactatttttaatccttaatttacttaattctcctccaaaactattaactctaccatgattgtaaaatttatccctcttaattcttggtgataataaaatttcattactattaggtgatttaacatctgctaataatgtcctaaatgattcattactatcaaataaattattaccattaataatattcatattaaggttcatattcattgtattatcaaaatcataattccatccacttttatcagtattagtagttgatttggtgtcaattgaactactatattgatgtctctgtggtgtacgttgttcatttttattaataattttacccttactgattccatcactttcaatatctttagtgaaaaatgaatctaatgtctctaaagttgctaacatatcacttaatgaatctttttcattaattgatatattatcattaattaatctctcttgcttttgatgatgtaaattaacttgtttttgaagttctggtgataatggattatattgaacatattgtgaaacaaattcaggtgattcaaataaaatatccttagttgtactattagcattaatttcttcttcattattattattattatttaatcctttaacaatttcattatctccattttcctcattatcaaccttattttcattttcattatcattatcattatcattatcattctcaattttttcaacattatcaatcttattcaattccattatacatgtaaggtaaaccgaatgaacattatttcttgtaattgcagttctaatacttggcattgggattgaccatccactctcatctggtataccaaataatgttgaaattttatcatattctttacgtaatgaattatcaccaactgacatcattaaataatgtttatcaaatggtgatgatttaagtattttaacttcatctaaaacttctaatgcttgctctgaatactctgttaataataatcttaataatggtgaaattaaatcagctcctaattcattaaattcttcattattcaaatcaattactctaaaaatatgtttcaataaatccattgtctcaatcttaatccatccaatattattgaataataatcctaataaaaatgtaattgtctcaaactcaaatttaggaaaaaaatacctcttcaataaattaacaatttgattaaggaaatcttccttatttctaaattttttcttaattaatgattcaataattcttgataatccaataatttcattcttatttgacatttcaattaaacaattacctacattaattatgtcctcattaaaccttttagttacatgtgcatgtaaaaatcttggcatattggctaataatgttaataaaactctatgtttaccatcaccaataatttgactattatctaataaatttaatttactcataattttcaatgttggttcatatgcatttgatgatctaagtccaatcataatcattttttgtaacccttcaaatttaccttcccatttacttggaaatgtagctgctaaacaattaactgtatcaactgaattaaaatcaattttactaatgaatttacttaatgttgataaaacttcaataaattcattttcatgtacagttgttaatgatgcaactgatgaccaaaataattgtggaaatgcaattaattgttcactatataattcactggtaattgcatttaatgtcattaaaatttgcattgaaaattcttgaattccactactattatcactaattgtattagttaaacataataacatatcctttaacattgattgatctaaaaatgatattaaacatctgaaaacttgaaatgatcttgatgcaacatgcattactttacatgttgttgcccagtaaattgacattttactccaatcattttgaattgttggtatcttactctcaaaaatgattaataaatctctaattaatgtatccattgaatcaggtttacgtccattagttttattattcgttaaatcatcataatcccataatttatttgaatgatcagaattacgtaatgatctaataatcctttgaccaacctcacttgttgcatcaccatattcatgaattaaatgtatgattaatgcagctgcctgatcttgaacaacaaaaagttgatgatccaataaaacaattgataaatttaataataatggtaatttttctctaactttatcatttggtatcaaaattaaatcagctaaataaattattgataattcacataatgaaaatgttggaatggtagttgatgaattcttttgaattaatttacttaatttagcaacatatggcaattcaggaaaattttgtttctcgatttcactaattaaatttaaattaacctcagtttcacttggtatcattgattttggttctaaattagttaataatgaatcaattaaattaaaattcattgatggtatggttgaaattgaaacaataacttgtcttgaacattcaacaaatgctagatttttcaacgataatgagttactaataataaaatcaaaaatagttttaacaccatcacctgtactatcggtacctaatgcaacccataaagcttctaattcattctgaattttatgactatatttcatagtaatgtcgaaaaagtttgataaaacaactaaataatttgcacgatctttttcggatgttaaatctaaatcaacagtttgaatccatggtaataaaacagcaatcaaatcacgtcttggtcctgagccaaccagattaaacaataatgttaattctgaaatcattctaaatttttcctctggatgtgaagttgcaaaatatgtagataattggaaaaatagttcttttataaatgattcttgaacgacaacaaacaccatcaacatagttagcaacattatttgtattataaaatttattctcagtaaattccaataataatgcagctgatgatctaacattataattatcagatcccgatgaaaataatgcaagtgaaagtggtaagtaaacttcagtattcaaattcaacattttgaaccaatgcatctgttaaagtaataaagtaattgcctaatgcagaatcatgtgtgtaacactttttgacgatcagttcaaaaatttctttgatattcccattgacacataaaatacctaataatgcacttctacctaaaccactaattttttcattataagttttgaaaagagaatctaaccaactaaagatagtacctaaatcaaataattgatccttataagagacaggacttttacataaacatgaaatacaactaattgcacttaattgaagttgatgtttttgaatttctaatgatgcttccaagtttaataaatcattttcaacagatattgcctttctcattaaactatatctatcgaggaatattggtgttttatccccataacctgaccattcaaccataaattgaaaacttctgtttctaaaattaaaatctagccacttctctgctgaattactttccatcaaaactgtatgaactgtttcaagtatattacaaaaatattttctcatcctttggaacttatagttaatttgaacgtttctcattagtaatgtgttcaatagattggataataatcttgtaattacctctaaaatataatcatccatataatctttattggttttggatattttgtaaataacattacttaaaatgcaacaaatttcctgctttaatgaaatatcagttgaaaaagttcctttacttgaatcttcccacctttcaatagagctttcaatactttgaataaaagttttaaaaatattaacattcatacaacttaatccttcaacaagtgcatctctaagtctgatattagatgtagttaataatggaactgtcattttgaaaattgatttggcacttgtaattttttgatgttgaacagtaaatagttgttgggatttctttcttgaatgatttctaactaaaggtgcataaatagatggagcattagtttgagtatttgatttcaaatcaggtatgtggacacgttgttcattagtggatgttaatgatgcacaagctattttcaaatataacatgtaatcccaaataatagcattgtcttttcctgtagatttttcattattgatacgaacaatttgatcataaaactgaactaatctgatacaactgtgtgatcttgcaatagctatttgaataggacaagttttaactaaaatatctaaaacatcttcaaatattttaaaccatatagctgcatcaacaccatgattactttcagctaatttgacaattgaacttttcttttcatttttgataaattttgcatatctttttaattcagcttcactgaattgtgattttttcttctttgttaattcaacaaaatttaatgatcctaaaacttcaataattctagtacctgattcagcggcaaatttggatggtaatctattatgacctttagtaacatcgttatcttcacttgataaataatagatgacatcatcaaattgggtaatcattcttaaaatttgacaacctaggaatctaattctgaaatcatgactaaataaaaacaataatgcatttccttcaacttcatcaatcaaagttgccatatttttcaattcaagtaactcaaattttttagtttctctaatttcttcttgaacaaaattacgattaacattgtacatagtattagctttttcttcagtttcttgttcttcagtttcactcaatgaatcgagccatgattgtaaaacttctaaataatagtctaacagtttaacataattatcagatgataaatattcattatcaacagaattggaagttttctcagtctaaacaaaatgcaattgatgaaaaagttgtcaatataacacctggatttttcttacaaatcaaaatctttaatgcatcaatacaaaattgagcagttgtctcattttcatgaatacaatttttaaccaataattcaacaattttcctataatgtgccacatttgaaggatttgcacaccatgtaatacttgtaataacagtagtaaataattcactacttttatatgatgtgtcttcagtagtatgaaaatatgataaacttgatattctttgatgtaaacttgatgtacttgttgctgaagatggagtagttggacctaaacttaaattactatccaatatcttacatccacattgcgattctaaagagaacaatactttaataaaaatggatgaaatttcttcatgaacttgtgcattggatgagttatgttcaaaaacatcgtctacacttgtattggaaaattctaatggatccaaagaattttgaatgatatcatcagttggatatggtggtctttcttcattttgataatctgataaaatccaacagtaagctcttatacagagaataattttttcataacttataatctcaaaattgaaatggttaaatgatgattttaaaaaaggaataaatatgttttcgagagtgtaatttaattgagaatatgcaagtgatctaaaaaattggactgcagtttgaatcaaaaatgcatcctcagttaaccattgttgttttttctgtatattaaggaacaataaattagcaagattttccattgttcttgttttagaatttaaagtatcttgatatctgaataaatatgcccaagttaatctagtaacacatgtaattacaattaatttttcacttgctgaggttttaggttttaaacgtttggagatactatcaacaattgatctccatttattttcaaacatttctttaggtgcaacagataatacggtaactgctaaagtaattgcattaccccaatatttatttgaatttgaagttgcaatttttattgcctttgaataaatcactttaacagcttcaagccatgttggatgattaacttctgcagtcaatgtaccggcaagagataataataactgattgataacatcacaatatgaaaggaataaattttcattttcacatttataaaaaaatttagccaaacttttaataaaatctgcaccttcttcaaatctttctaatgaagcatttgaaaattgtaaatatctcataccataaattaataaatttaaactagcttcagagaaaggtttagcatttgtaaaacctgttggaaatttttcaagatcgcaaatgaaacgatcactaacacttaaaaatgatttttctgacatttgaccaattaattcagataataaattccaatttgctgaatggattaatgattgacttactaaatatggatcaatacttcttaaataattatacattatttcttcaagtcctgtatcctcggtaagagtagatggtggtgtttgtttaatgacttcaattaaaactctccatagtataaaagtactaatagtaaattgacgatctgcttgagtaaatgtaacttctgatttatgtaactgatcttccaaatttcttaaagtggcatctttggagttagagtgattatcataggagaaattggatcttgataatgatttttgatgaagatgatgagaagttgatctatttccctttgaatttaaataattttgataatttgacatgtttttctctaacattgatctagccatttctcttaattctgacttcccacgacgccagtgcataacagcatcagtaactctttttggtgtttttcttgcaatataccccaaagaggaaatcactctatcaaagttggaatctaccccttctgataatatttcgacgatatttggttctttatttaacggaaaattatttaaacataaatttaattttctttctgcaaatttagtaaattgtcgtacaactatattcaaagtataactaggtgcatgagtttgtgaagctaatgatattcgtttctcttctaaaaaattacttgtatattgttgagttggagtttgtaatggagtttgtgccaatgttgatgagccacctagtttgaaattcttattcaattgaccatatgaagaattatcattttcgttattgataaaagatttggaattattgaatgaaaaatcattaatactgtccatattaaatgtattgttaagaaaattatattgagcatttgatgcactcttcttagcaatcaaatcaagatcaaactcatcaatttgatcatcatcatgactatctaaaatattttgattattgatatatgaatcatccattcgtataccttcaatttgagtactacttgcagccatggcatcaatcattagatgcatattattactactattattttgattagtactgtcattaaagtcaagatcaatttgtggtggagttggttcttgatattgaagaatatcctgttgttgcagagctaacatttgattgcccgttatacttaaattttcaatttgatgatttatgctatgttgttgttgttgtatattggtttcagatgtttgatattcgtttgtttcgttcattgatttcatgcctttaaaactatcatgcgtttcagattgatcgttcctagtctcttgtgactgtgggggatactggaagttgccaaagttttgtcctgcagagagatcaggaatttcaattatttctcgttgatcagtagatccagcaatgtcagaatttgcgcctgaatttgacatattagtataatctttcataaactaaatataagcacaatgataaataaaagattatagggatagttcaaattctgaaaacgtgttttctctaaagggttaataatgtctatcccaaatgtatacaattatagaaacaacccaccaagtataacaatatatcagccacccaagggattcttcgttaacttaaaatttaattttacacaggaggatgagaaatttcatacaaaatgggttacgtaataaagtatacatgttactcacttatatagaaccatagagacatccatctctggcaaatccacctataatgtcagtctttacccagaattcatcgtctgcatgaagactaccactcttacccaaggacatacctctaacgtatattacaccttgatttgtgttttcatctacattgacggttttaagttctacggagttagcaggaactcctaataatgtcaatgaacgattttgaacaattctgaaatcaaatatgttagttttcaagattggtccaatggtgaaattagtgtatacctccctaactatcgaacttcccgtcaaagatttacaaaaattggacattaacgatgataatggtggatttaattgtgccacgtatataattttaagcgttagtgatctatcaattttaccaaatgtattgaaataacctaatgagttgaaatattcagatctttgtaatttaaaactttgccagaatgattttttgctgtttgtacataattttttcaaaattttagaatcagtacaaagaattgatgatttgaattgtgataattcatgaagatttgaaatattatctgggttaacaagctcaattctattcaagtttgaaactaatccacacaatgtttcaaatataatattgttgttactaaatgtggtttgtgtaaatgaaattaacatattatcatctttagtccaagattttgtgcttgggattgataataatttcgaagcaattgatgagacaaaattaatctggaaaaacttagtttcattaccatcaacgacataagaaaatgaatgattatttacatgatggaaatccatgtttggatcgtatttgaattcctttgtagtttctttatcaaatgttgataataatgattctatttcaatagttccattaaatgtagtgctgtctatatcacttttagactttgaagatgtaataagtacggagactggtgtttcaattttagatttaagatcctccttactatggaaataaacgacagttttatcagagatgaaaaagcaagaccaaacaaccaatagtaattcaggtgattccattaaatcaccatatataccaatattttcaaaatttgacaattttaatgctatttgatgtaaaatgtaattaatttcttcaattttaaaagacttaccacccaaaactatttcagtagattttagtttatcatctctatttttcaatccacaataccaaacatctttcaaagcatccatctctgattttatagccacttcttaaatttaaacctctagtgacactaacaccgtgtggaacatcaacagatctataaattgcagattcagcatgactttcttgtttcactaattgaagtttgattgttcaataataagggatcaatttccttaagttctcttgccaaatgattatagagaaaaactaaggcagctattattaaagctgaaaattatagtagataatgcagacatcctagactgattgttcctgtaagaaaggacctttagtcagtatatttaagattcaatgccatgataacgtgtgatcttttcaaagactctcggggctcgttctttttcgtataattttcgtatagttcgtataagtaatttttagtaagcgacatggaaattgtcgtgatgctgttatattactgtcttgtaggtgtattttcttttggttggtgatgtttataatggtaattataatatagagaggtagtattacaattatagtgaatagaatcagttcaaaaaagtggtaaaattattgatcttaattattataaatattgatcattgaagatatgataaagatgatttgaaaaatactagtaatagaaaaatattttactttctttaaggttcttgaaatcataaaataagtgtaattcaacacagatcaggctaataaaagtcatttgcaactataaaaatattattatagtgcacatttaaaggtctgtacataacttaaagataagttcaataactgagccttcaaccaaattgaaagcagtgcaccaaaatcattttttttgatttccactatattatataaacatgttactatttggttctactgggattgtgctatacctatcttaaagtcagtttactaaaagttaaagtgtgggatatagacacattgcaagtgcaattgactagaaaatgccatctgaatttattgatgcgagtatgataacgctagatagcttttcatctgaggttataccctctgattttatcaatagtatatcaaaattatctgaagagactaataaagattcatacattcataccgataatagtaagataaaatatgttgatccagctccgtatatcaattcattgcagagcgttcaagatagattggtagtattgatggaagaatgtgataaaagaaaagaattgttttcaaaatcaactgccaaaaaggaaaatgatcattatactaatattttaaatcaagcaccaactgctactgatttaaaagggaaattcaatgatttattattcacagtagaaaaattaggctccacaaagattgatccattaggtgaaaagttaagaaaggcaaataccataaaagataatgcactgaatataatctttttaatgaaatactataatcatttctataaaaaaggagaagcaccattagaattaacaactgataggaaaagggcaaacacaatcgaaactgctaaaattttatcacaattactcaagctatcatccaaactagctgaagatgatagtttaaaaaatgcacaaattgccaaaactttgatatttgaatttgctgattcctttgagaaggaacaacttaattctttcaatacttactatcaatcgaaaaatttctctcgtttacagaatattgcaaaaactttatttgcttataataatggtataaatattgtcgatttctttgtcaatagtcatccaatctttagtcaaatgcaagatagtgttatagaaaaaattgatatgagtttttggaaacaattaaatgatccaacaattacaaactttagcttagattctgtttcagcaaaactcttagaagcgacttgtgatacagtgtcttcagaaatcgattcaatcactactatttttcaggaaaattcaaagtttgctttatcttctttaatattaaagttatttggaaagattattaaacctagattgaaattacttactcaaaattcactaccacaaggtagattatgttatttaagaattttacaactattctccaacggtgttatacaaatgacaatatctcctttaaaatcggttttacttgacaagaatattgatttaactttggagtttgaaaaagcttacaattcattatttaatgaatatttgaaagaagaattttacttcaagattgaaaaagaaaatcttgatcaattgattgatagtttgattcaatcatatgaaatagcaaataaagaatctctaagggataaaaaactttctcttgcaattgaagcattgaaagaacaagaggaaatggtagaattacaaaatgaaacagataacatgtcattaactactgattcaacatctcaatatgagacatcatcagcaaaatcttcatcagcacccgctactgcaacatctgtcgaatcatccatagcttcaactcaccgttcatcactttatctaccagattctcgtatattcagagataagatgaaaagtgctaaaaaatatgttcctagctcaagaagaattaagaaaatatcaggctattcatcttttgttaaaattaatgaaaagcattccatttttgaaagatataaatcttcaggaaataatgaaccaacaatcttttcgaactctgttcctaatattactgcagttaacacagacaacaaatgcgaattatcattacaagttactcaaagcatttacaaatcagtgttggaagcacttactagaactattgatttggttccatctcaaatgaatacatacgctgttgaaattttcaagataatgttgtataaaataggaccttcatatattgcattaggtcttgaatcaatatacaacatttatgttgaaagtcaatcaaagaataaaagtgttttcagccgtggtgttaatgttgatatagatctaagcttcttacactatatgtacaacatatttttacaattatatcttctgtcaactgttgtaaagaaatcattttaccctttacttacaaatgaaaatgatttaaatcttattactgattcttttaacttgttttaccagaacgttgaaattggtatcaatatcatctttaaagagactttgaacattattgagaataaaattgatttgatcttatcaaagcaaccactcaacgattatagtactgcaagtgaaactgatagaacagaaacatcaaagcttatgacatcatttttagagaaagtaataacaagtgcaattacagaattaaactacgattctaagctcaaggtgaaatttgtttccgaaatttctcattatttcttatctgcattgataaaccatttaagccatttaaaggttacaatgaatggatttacaatattaacacacgatttggctcaatacctgttagttttcattaatctgaaagtaggtgaaattagcgaagatagagattattatgataatgaagaaaatggtacaattaccaactcacaaatatcagaaagggaacaactagatgaaattcaactggcttataaaattttgaatgaattacctggtctttacacttgtgagccagaatctttgaaagatttctgtagcgaaggtaaattaaaggatttaaagaaaagtgttattcgtgatttcattaaaaatagggaagatttccaaccttggttcctttcgaatatttaatttatcttttagctataaaatttttcttaaactctatatattaagttaattcttattaaattccagcaatttattatgtagtaaagttagatccatgcttgtatcagaaagtacttttttaatttcaccttcaaaaaatacacatggttctggtgtgccaacagaaacttgaaattcttttttatcaacactttcttgaaatttcaagattaaatctgaagagatcgaatacttttttgtcaaacatttaacaaggcaattaagtaaaactaaaaatttaccaatcacaacgcctctgtacttgttatcgtcatcatcatcaaacagatccatcataagtttaaattgacttccaaacacatttccttcttctgtcagaatgatcttttcaataaaactaataatggttaaaacttctagctgtgatgcaaattctatttcattgatattaatgcataaaaatactatttgatactcaatgaacctcaaaccttccttatcgaccttttgaagtttgtgcatactaatattacctattactctaagtattgattgaataaatttttcacttctttgtttactcttacgacttttaacgattctgaaaaatgttctcaaaaacgaatcacagcttttaagctcatctaatgagtataaaatcatgacatatccaatagttttcttgaaggcttcccagtatgttgattccatcaaactttcaaatttttcaaacaaaaacttatgcatctcaattgcaacttgtttaatatatttcgacctagaacattccaatgcaactactgtagggaaacagacttttggattcgaaaacccaaatttaataatcatccttaaaaactcaattgaattcatcgcaacttcattattcttcattaagcagatatttaaaatattaggcatgtatttttgaactaatgttgagcaaatcccatcattaacatattcggacgagttaccatggaaaacagcaacatctaatttaattgaacttgagcgtttgacacctaatccatttttttgtatcatttttcgttcttcattttccagaagggttaaaagagagccaatgacaatatttttgagaatgagatcagtcttcttgaatactgaatcaactagttgagacactggaacagtaaaaaataatttaggatgtgaaacacatacattcaaggtgtttttgatagcaatctttcttatatatggaagctattgaagaatcacaaaactttaacaaatatttcaacaagaaaacagaaattggttcatcctctctgagacccagcttagcatcgtcaaacacttgacgatccctttcaaaagcacaatacctcccaaagtttccaacaagatataacagtctggggatagtaggagctggagtgaaattagatcctgaatcattgaaatcattaataaacttcagcaacattcttaatgaagatacacatgccttcgacaccccttgtgtattgtcatcaatcaaaaatagtttccaaacacattgaatagcagagtccagttctttggaattgaatttagtaagtctggccatcaatgatgtcttacacgcttcaacaaagttgtgatttagtgtatgatgatgatttagagctagtttcaaaatttgtaatgcatgatagcaaatctcatttgacaaatcatcattaacaatatatggctgaatgataattaactgatgttgtgagataagttgttcatcgcatctaatcaaagaagacaacaccttcattatagattctgttggatatattctcaacaccaactgtttctgaatcagtgatcattgataacatgtagtcaactaaagcatccaaagaagcatctaagatctctttaatgtttttattaaacttacttttgtgaatcaccttctccactaaaaatctttcaaattgattaatacttgcagttccatagaggaaaacatcacataataccctgatagtttgctctgctttagtttgaaacaataccgaatctgaactcccatgcatctaatttcaattcaccaagttctaaaagtaataaatcacataaattgtaacaaacagtatcaactattctatcttcctcctcatcaagttgacccagtaaggaaactattaacttagctttgattttaatatcatctagatttttaaacatatatgagattaaattaattgactttcttttgacattaatacttgactcagaaactttctgtatgattatttcatagtactcacttatatactcaggtttcaactctaaaacttttaataaaagctctaatgtggcgtcaatgacagtcgtaaacgattcctccagcttttgtttaatcattttcctcaacctttcatcttgtaatagttctggttccttattgataagtaaagttaaagtttttattgaaagagttctagttttagcttttggatcacttcagtgacatcaaaataaatgtaaacacttcattatatctgttcataaactgcgtgctcaatagtgaatctttgaatgtttctcttatttggatttctgtgattgaatcaagatcattggatgctttttctatgtagggaatctctctgaaagaaaaaatagtgtctgaaactttgttaagcagttttttcttcaatttcatttgatcaccaataacttcattacctttcgatgtaacaatttcctccaatctaccctttaatttattcaattgaaccaaatataacattaagtaaaactgatacagttctggatttgtgtatttaaacttcaaataaaaaattactcttttaaacttatctgaagattcttccaatgatttgatatctaaatcactgttcaacaaaacatttttaccttctccttttatttgcataattttggagccgattgtcccaatcaattcaaacagaagagcatatgcactagttaaagcagagtctccagaattattacataaactcaacccatttgttaaaattgaatctaaaaacacgattgaagaagaaaattcaggaagttccatcataataaaaatgtcagcaaatatattctcaatgatctttctcagtgttggggtatataaagcaatgatctttcttaacaaactattaacaaaattattaacagctttttgcattgattcatattgatagttaacagaattccaatatgattcattcatttcttttaattgtgaatttttggcttttgttttatgatcaatattcaaatattcccactttgaataatcaaaatcttcggtataacttgaatgacattcaataagactgagtatcatataagaaaccaattgaacagtaattccacaattcaacctataattttttgactttgatttaagtggattcaaagtattaatattctccactatttcattaaatataaaagctctttgatcttcatactttctgtatatggaaataatgagttgagcaaactcggacctcaaatcttctaaagcaatatttaggttaattctatcttttgtgtatgtgatatcagcaaaaatagcgtcaaatgaaatatactcaagacgtgcaattagagtttcagtgaatggaagaaaaattaagttttcacataatgtattgatcattaaagaataagatttaatgattggaataaaaaaatcaggaagttcaataaactcctcaatttgaaaaagaccttttataactactccaaatgttgaaatcaaatctgtaacaatagataaaccgttttcatgttttgttatttgatctgttaaagagtttgaatacattataagaatcattgaacagcattgaatcactgtttcaatgtaattttgatattcaccagtattatatatgtcctctgaagtaaaaatgacctcccaatctataggaaaactctctttaattgtcgagatgcagatattaaatagccacgagtatactctggggtcaatagcggttaatatatcgtgagatttgatttgaagaagtttggttttgatagaagtcaatacattcacactagcaatggtttgttcattttgaaaaatcatgttgtaagagatccaaatatcatcatcagaagcagaatcacccaaatgattatatccttcatgtaattttgtaacatcactgataaaatcattaacaacgcccacaatcaaatcattttgagtgaccgaagaatcgtataagaagtcaggtttttcaatattttcatcaaccgtatcagactttcgtactcccgctggatcaggagcaggagtatcttgaaaattaatcaaagccgttatttcttccaaagtgttttcattctcagtttcactttcgtgtatactagcagaattattgttatttgaaagtaattccattttagttgattgcatgctacacttcaaataatctgacttagagacagctgtgatattcccagaaatttcatctattatagcattggtttcattaatgtcaagtggattttggttattttgtatggttggacgtttaaatttcagaaatttcaaatcaggatgttcagatttccatgtataagaactcaaaaagttattttcagttgagttatcatttacatcatcttgagaaaaaagtatggtatcagagggaatatttgtatcatatggaactatcaaagggaccatagactgtattggtatgatatgatttataggatgattttgtaaaactgcttctggtgttaaattttggaatgatgtacgtttttttgaatcatttttataaggtaacccccccctgttttctttatccttatcaaactctgtgtcaagagattcattctctcgacttcgttttaacatcgttacaatcacagatactgtttgaaagaacgttaagaaaaagagtgaagagcctcttgccttttcaaagagaccggagtaaaatttcaaaaattaacgcgtcataatgaaactctttagggagggcttcccatcataaaaattaataggaacttttcaaagagagacctataacttctttttttacttcatcatcggacatcatgtctacacgtttatacccaaggaaagagatctctgaaaccgaaattaaagtgcttgttaagaagcagaacaaaaatgagatctcatggtacattgatgaagtaataaatacccaattagagtcagttaaagatgtcttgacatcatgtgttgaacatttggacgaaactgattcaacaccttataaattaccattgtcatcacatcaatctgaagttatcaaggggacaattactagagagaattttaagataacagagttgcatttgattattaattctaagcttttcaatggagggaaaaaatcacaattcaaattgatcgattcacaatttatagtcattagacagctattggattgtcatgatgccatcatgaatgcattatcgaatatcgataagattggagaaaacaagaagaatggtaatgatatagatctttttataagatacatggatatgctttgttctcatgttaataatgctcgtaaatcactaatgaatgccgatccattgtatcaattcccatcatacagggtgaatggtacattatttgaaccacaattacccaaaaatggagttttggactttctagtgaataatggtgagcttagtgtggaattccgaagtctaaatgttgttgagaaaaaaccatggagtatgataattgatcctgcacatagattatcttttgctgatattgtgaggaaacaaatagcaaaaaaacgtggaacaccggtcaacaaaattattgttgaagaatatcaaaaatatttggattggaggaaggatcatcctgacttagatcatgaagaccaggaagaagctggattcactagtacaataaaacacatattcacttcgaataatgacccatcgttatctacattgattaaaagtgcatatacatatttggaggaatccttcacatatatcgatgacaaaagccggccttttgttgtaaaagttgctgataaatgtgaagtagtgacatcggatcctattttattgtccattagtataaaattagagagtattgaaaagacacttttacgtatacgagaaaacttgactaatatctattaatttacacttttttataaccttttatacaatattttccaatcactaggacttgtaactattaattgtctcccattttaatttaagtattttttgttgttgttccaagaccagctttttctttttgcacttttcaaccattccatcaagtactttgttatctttctctaatatgggtttcaccattttccttattttcaaaggcctctgtaagattagacgttcaggtaaaacatcgaagagcatcttagactctaaagttttctgcaatactccaacagactttgtctgcttctgtatctcacttactgcatcttccaaagataccagacagttctgtagcagataaatggatgtgtccaaacgatgttccgatgccattgtcagtaatatcactctaaaaagacaccaaccctttgtaaaaaaaacaacaagatacatcctcaaaaaaattatcaacactccaaaaaacgagagcttcaaagccattggtaaaatttcccatagcgaagctttttcacgattccttaattaaagctattgtttgacagaaaattggtgaaacggtatagtaatatttaattaatttttcgggaaactttgttttggtgctactcaagcttcattcctttccccttaaaatttggtttatttcgattagttaacacatttctgattataattgattctatctaagtcacccaatgtctgctactgatacacagacgttagatggaaaattgcctccaggagaaatcccattggcaaggaaactttctcatcagtcgaatgtttcctttagtaaagttgaaacaaatgatactgataggaacatcgagccaacaatatcgtttaaatcttagtggtcccgtaagtaggtcaattggtaagaaattgagaaagaaattggaacaaaaagaagccaaaaagagaactgaacatgcagcttcatttagaggttggaaagaagttactggttatgattcatcatacgatcttagttctgttgatgaaattatggatcttcttacaagggctacaactctggatcaatatcttcccgaatttttatatggtgattggtatcatggtattgcaatcattatcttatcaagttttttatcaactatattgggaaaattcaaattttcattaggatttgttttcttaattacacttactgctgcattatattatcgttcatcaataagaaaatacagattgaaattaagattacaaactcaaaaagagttttctgtccataaaattgaagatgattttgaatctatggactggttaaatgtccttttggataaatattgggcatttcttgaaccttcaatttctcaacaaattactgatattgttaacccaatgcttgctgaattggatacaatccccgcttttattcaagaactttggattcactcaatgactttaggtactaaacctcctagaatcgataaagttagaactttagatcgtaccggtaatgatgttactgttatggattggacattttcaatgattccaaatgcactggaagattcaactcaaaaacaaatgaaaaacaaagttaatcaaatgatccttattaaggctaagctgtttggttttactatcccagtttatgttagtgacgtttccttcaaagccaatgctaaggttagattaagaatgatggaaaactttcctcatattcaaactatcaatgtttctttaactgaaactcccgatattgactttattgcaaaacctgcaggtggtgaaactatttttggttttgaattatttgcaattcctggtttatacttacttgtaaaggaaatgatcaaaaaatatgttggtccaatgcttttttctcctctatcatttcaattaaatcttgaacagttattaaatggtaatggtgcaaatggggctttaggtgttttagaattaaatattaagaatgccagagatttacacggtgctgatactttcaacaatacaattgatccttactttacctttggttttactgatgaagtacttgcaaaaacaaaaattgttaatgataccattaacccagattataatgaaaccctcagaattattttaaactcatcatctgaaccattagctataaaattatacgatgagaatttgtcagatggcagaaaagataagtttatgggtgctgctttgtttgacttggaagacttgatgtcaaaacaacagttaaacaatgtttccattcctattttaagaaataatcatcctgcagggactattaattttgatatcaaattaatgaaatctcttcaaggttcaaaattaccagatggttcattcagcccaccaccagattataatacaggtattgctaagattgaattgattggtgcaagaaatttcactgagaatgaagaggagaaaaagtctgtgtatgctcaagtttatatcttaagtgaaaagaaattagaatcgaagattgttaaaaatgcttcttctgcaaaatggaatgaaaaatttgaggaggtcatttatgatagatcaaaggcaaaaattcgtattattttaagagaaaaaggtaagaaagtggatgaaattattggatcacatactttacgtttggttgatattatcgatgcatcgtatgttggaaatccgtggtttacaatgtcaagtggtgtaggtgaagttggtatatcatgtaactggaactcagttaagatcttaggtgttcctggtgctattggttataatgaccctatcggtgttttgagagtttatattgaaaaggcagatggtttaatcaatttggaaaaaattggtgtcattgatccatatattagaattttaatcaatggtatacagagagctagaacattaacaatgcaatccactgttaatcctaaatattatgaatcgttgtacattcctatttcttctgtgaaccaaagagttacaatcgaaggtatggatgttgaaagacatggtcaagatagaactttaggatcattccaattgagattaaatgagtttattgattatgatgataagggtgaagctattgagactacatcagatatgaaaactgcaagattattccataaaaggaaaggtgcaagaggtactgtttcatactcgctttctttctatcctgtaagtaaaatgattacaccaaaagagcttgaaagagagaaggaagaaactgaaataatggtgaaaaaaattgaagaagaggaaaacaaagataaagatgttaaaactgaagagaatgacgagaacaaaaagaatgacattcatgatgcaatggcaattaaaactcaaaatgttttacacttggaaaatattccaaagtacaattctggtgttgttattatcacatttttaggttcaaatttcacatcgacaggatatttccaagttttctttgataagagaggtcattctgcttatgagacgaaggtttctccaaaagttgatttgaaagcaacatttgatttcttagttaaagaattacaaaagtattctgttgttacttttagagttgctgaaaaacctaatcaaaatcttttgaaaacaacaggaaatgaagtcacagtttctacacactctttcttagaaaactcatatgataaggtcacatcaatgaaagttggagaaaatacaatcaaactttcaagtagatttttgcctgctcaaatttccaaattaccacccgcagattctattggtaattcaggtacattatacctcgaaattaaaagagggtttgaattattatccaaagattctaatggtaaatctgatccatttgtaaaattatatttaaatggtgacgaattttatcataccaaaactataaagaaaacacttgaacctgaatggaatgaatccactagtattaatattgattctcgtgttcaatcaattttaagagttaagtgtagtgattgggatttcggtgttgaacaagatgataaaatcggtgattataaatttgcacttaaggctattgatccatttgttgataagacgattgactatgaaataaaactcgtttctgatgatagagcatatgcaggtactattgttattggtatgagatttgaaccagaatatcatactattattagtgctgagaaagcgttacctaacgcatcaaatctggctgtagatggtgcaggaaaacttattagtacaggtgctagtggaactggaaaagttttaggagttgcaggtaagattggaggtaaagcgttacatggtgcaggttcaattggtggtattttcaagaagaaacatgataaagcttgatatctttctttacagtttatatatatatatatatatatatttatctaaagattaaccatatttgtatagttttattaataagtgataacatttttattgtatcaacaagactcccattgaaaaagatgggttgggcggaaaaagcccatcacttcaaaacccagcacgccgttttttttgttttcgaagctataggtgaatcatatactttttcttttacacaagcagcaatggaggaagtagagaacacaattgaacatgaaattgataacacaagtgagttagtacccagtgatgatgatttcggtgattttgaagaagttgatcaattagaagaaaccgacaatcaatcaaatgatttagttgaatcagacacaccacatcatgaaatttcaatcaaaaacatatcgttctttgaaggaaaattagacgatgacgatgctaaaataagtggactaattgataatatactgaaagatacattactacctgaacaatctgataacaataatgatactttccagctagatgaaagagctaaacaaatactggaaagactgacaggagaggacgaatatactgtcacccaacccaccatatggaaacaaagcatgatttataaacacttgttgctgaatttagaaattcctcaagatatagatgtcaccaaaagagaatcgatctcagctggaagtacaagtaccaaacaattgtatgatattgaagagactgttttgctggatgaagatattgctaaaatactagaacaagttccaaaattcgagtcgttgggtatatcaaagaaaagagaagaatacagtgaaaaactaagcaatactagctcaattatttcaaaaatcaaaaatgagttactatcagatgaagaatctgcagattatttggagcaattgaaccagcataaaattgaattgcttgatttactctcagtatggaatgagcatactacagaagtgaagcatgataatgaaatatttacatcatacatcgagaatttaattggtaatacacaaaagctaagaagagagacaagattatccaagaaaggtaaaggtagaactaagttttaaaatattcttcacttaaattggttcatcaccatatttttgaacgtatagaccaagtgctttaattgggaataagaatttataatttggatattcaattgaacatgaatgattaaacacaccttcaacggattcaaacttccattcaccagttcccaattgacgtttaattatcaaatcaatacctcttctaataacatctttttcaggataatcagccaagattaatccaataaccacccaagctgtttgaacaaccaaagattctaatgttgtcacataagtatgagtttctgaacttttcattgattcaccccaaccaccatcttctaattgtcttttaacaagaaaatcacaaccttttctaaccacttcactattttcataattaagattaatttcgtgtaatgattctaaagcaaacattccagcatatgtgaaacaaacaccccaacaaccataccatgaaccatcaacatcttgtgcatctattatataatcagttgctctctttatagttaacttaatatcatcttttctatatgtggaatatttattaaaataagctaaaccaagaacagatgaatcggtacattccacatatggatattcaaccataatatttccgaaaacttctgcaggatttattaattctaacataggagttgccttaatttgttcatatgttgaaaatgaaccaaatttataacttccaacattttgtagtgttaaaagtacatcaattgcatcatttaatttatttatatcatacaacgaatgtaatttttcaaaatgtttagaattcataaccataactattgctttgatagattctgctgtacaatcagaaacagtgtatccttgttccttagttgaaaatggccatgcaccctttcttttatctctgaatgatccttcaacacattccgtatcaaattgtgaattaattaaaaatttgaaagagttttcaataacatgataaaattcaggcaattcagccaatcctgcattaaaataatattgtatgaaaaacgcacaatcccagacttgcgaaccatttgtacccataactgttaaaccttgtttacctagaaataacgtttcacttaatctattgaaacttttcaaataatcatcaccggttggaccttgaacatgataaagtacgattgtttgaaatgctgcactaactggtgcaattcctaaatattctgtattttgtaattctttgataattaaatcaaatgcttttttattggaataatctaataaccatttaggtcttatgtaattttcataaaatactataatattattcattatatttaaaagtttagtatgaggataatataaatcaacaccacatacattatttctatttgatttaaaatcgatttgatcataaggtttaacaaatatttccgaccttatctcttccaataatggatctaattcacaatgtattttagcagttgataaatatcccaatggtatataaattgctcttgtatgaacccaccatttcattggatgaattggtattgaataaggtaatgcaaataattcagttggtgcaggattaacaccatcccaatcatataagtttaaaacagctaaccatgccttcccccaatgaggacaaccaattgcaccacctaatttatgtaaagttttcaatgctttaacacaaactggatgtgaagatggtaatcctaatattcttaagattacgtaattaatagtagtaccaaaacaagttgatttatcaaattcatgtaacccccaaccaccatcaactggatgagcagtatttacaatatatctaattaattcacgtttttcatgatcaggtattaaagttttagtaaaataacaacatgcaatataaccaattgtcataaacattggacctttatattgaactggccaagtacctgaattttcatcttgaattgatttaaagaaagttgcaccattatgtaatgcttcattaatagtatttgaaatttcaaattgaagttttggtggttggaaatcatcagtttcaagtaaatattttgttaaatttgattgttcattgatatgaatatttttatcatcaataaattcccatctttgagcgcccagttttgttgtatttaatctccatttactgaaatccgttggagtgagacctatctcatcagaatatggcattgtctatagtacaagtgttggtccttatatatatatgaaaggactataaccaatatctcaatgccaagttgcttaatgtcccacgtagactaagtgccaatatgcgaatttgaaaatttcattatacgagctatacgaggtagttttactatttacttttactatcaaagtttaaatgaatgtgttttaccactaataccatcaaaaaccaatgaattattgacaggtatatattgattagttaataatttaataatttcttgaccagttataccaccaataacggcagaaatattatgaatttcaattcctgaatatcttgaaatttcatcaagaaatttatctaaaccatctgggaatgatggtaatgttttttcaccgcatagatacgatactgctaatgttcttaaattagatttatcattttgattaggataacgttgttctaatttaatgaatttttcaagaatttggaaagcaaggtataataccatattattattattaggtacttgttttaatactgtttctgatagatttttatgttttgatccattaattattttcagatatttacagtttttaacaaataatgtgataagatgatcattatctttaagttcagatggtgatctgttaagtgaatttaacaattgcattgattcaaagtaaataaattctttatcagagataaattttctacgataaatttcctttaattctttatatttttctgaatctgattccatatcaggtaataccccacttaggggtaattgattatatttatcgtaaaactttttcaaagaggaaaccaaaatccagaaaagtgaagtatcacaggttaattcattgggtatattattaaacaattcctttatattttcacttaattccgatgaatttttcattaataaataagctttattataagcttctaataaatttgattcatcacgagttagaaataatttatcaatttcttgtcttatttttttagtagtgagttttttcccaaatttttgtttattatcttgatataatttaattagtattacactataaggatatttgaaatattcattgggattagaaacatgtgatatatctatattattaatataggatattaattcatcccaaggagaatctaaacgtaaatccactaaatcattttgatgagtttcaattatattaagttgattaaattgaacagtataataagagtaaaatccaattgatgataatttaacgaggggtatatttaaatgccataatatttctgataatagatctatatagcgatctgtttgagcatcaaatgaataaacaacacaatcgaattgtttccaaaaattatcaccttgtgaaatgaaagattggagtggatcagttaaaacattaattgatttaacatcagggttaagatttgataaattatatgcgatattttgagcaatatatttgaaagaatgagaattattaatatcataaaaataattagatttaagattatttaatttaagtaattccaaggagtcatttgacggtatagttgattgagaatcaattattgtaattgaatttatacccggtaaaattatatttttcattgtttcagtagcagctgaggatatatttatgaaacagacagaagagttagaaagagcattttgtccattagtattccaaagacgtacttgtctatcataacgatccatgatgaattacttgcatgtagtagtttgctttctactcgattctaatcgataattctacaatcgatgatatttcatgtaagaagcaaaatactttttaaaaaaatacccatcacgtgacacgggtgagcacgggtcggaagattgacgtcaacccgctaaggttaccaacgtataaacacggaacgccacaataagaatggaaagagaaagtccgagataagcaaacaaaaagaaacaaaaagaaattaaaagagtgacccttctttatatccgttaaaagaggggggggtgtattttattcaaatttctttatatcctttatctattttgcacaatctattgtctatcggagtgtcagagtgggtcatcattattaaaagtgtcttaatttattaattttaatgttctcacatgatttattttatttctattcatcaatgttaatcatattataattataattgttatgacgtcagttaattttatgcacatggttctataaattgggatctgattccttacttttctctttgccctgattataacttctattttatactctcctctttactctattcttctattttattctctctgtaacacaaaggaatacaaactttgaaataaactaaactaaactacactacactacaaattaaaatgcttgcaaatcaaagaatagctatcagatcattttcatctgctttaagactcgcaaatgttgcagcttcagcttttgcaagacataattcttcagctattaattcaggttcatttaaaacatttgctgaatatagaacatttattattaagaaagatccagaagcatttaaagacaagacatgaaattatgtatagtgatggtaaaccggaatcatgtcctgaaagtgaagctgaaaataatagtttctcttctgaagttaaaaaagttgcttataatgcttaattatattatcatataagcaattcaaaaactatacctatattacactatattaccattcaaagatcaccttttctaataactcattacatttcacttcttttacttaactttttcaagttttctaatgcttgacattagctagatcatcatattatattatttgaattttaagattttataattttataatttcataattttataattttttccattaatttatttaaacattattaatactataattacctatatacacaagagagagaaagaaacattgccataaatatcttaccaaacaccttttctaacacctggtaataaaccttgtaatgcttgcattctaaattgatatctacataatctaaaatctctaataacacctttacctctaccagaatcaacacatctaccctttaattgatttgctcttgtataatttggcattgcatttaattgtaattgtgcctctaatctaactttttgtggtaaaacactatttcttgcaataaattttaatgcccttgatgtaacttcattttgttgaaacatttgtctcttaaaatgatctctcataactcttgtattaacaaatgttgatggtaatgaaactggatgtgggaatcgactcattggtttacttctagttgtaagtttaagagcatttgcagcagcagatgcagcttgtgatgtaggtactgacatgattatatttgcttagctgattaaatgaaagcttttctcctcaactatattcactcacaacctctattaacaccaattcatgtcgtggaaaggtgaaaaattcctaaaaaagtgaaaattcatgaaaaacaaaaaaaaaacaaaaaaaacaaaaaaaaatcaaagcgacgctatcgaccgctttagcacaccgacccacagacgctgctgacataatataccttaatataccatccaaaatagtgatataaattcgcaaacttctcattggttcaaaatttacctcttgaaaattatcattccaattattttcgctttgacaacattaaattgaatattaactgatatttgcatctgatatttctaaaatatatttttggattgttttattagattaaggacactctcttcattaataggttcaaaagtatgctttcaaagagattattttcaacttcttcaaaacaattatcaaaggctaatgtctcaaaattaggtaatggtattactatcattaataaaccttcaacaacttcaaaatcttcaattggtttttatttaaattctggttcaagatctgaaaatccttataattcaggtatttcctctttattaggtaatttaattacttcttcaaaatcatctaaagatgctcttacaaatgaaggtgttaaatattattcatcaaatcaaaaggaagttactggtttattatcagctgtttatccttcaggtaatgcttctggtgcaattaactctgttaaaaatactttctcacaattagaatcaattattaatgattcaactaatttatcaattcaaaaggaaaaatcaattgcagttactgaagctttcgaaaattctccaaaggatatggttattgaacatatgattggtaccgctttccaaggtacttctcttgctttaccaaaatatggtaaatctgaatctttagaaattttattatctgaagatttaaaatcttatttacaaaaaaatttagtttcttcaaacttatcaatcgttgcagttggtgatgaaatttctcatgatgatttagttaaattagcatctgaattaccaatcccaaccggtgcaaaaactccatttgaaccaacttctttcttaggttctgatattagattaagagatgataatttacctcaagctcatgctgcaatctctgttttaactccaggtttaactgattctgcttcattctatactggtttagtcgcagctcaaattaatggttcatatgctggtattaattctccattctctccattcgttggttcaactttagctcaattcttagaagaatatcatttaattgattcattcgatcatttccaattagcttattctgatgttggtttatggggtggttattttgcttctcataatgttggtaattatgatgaaacaattcattttgctttaaagaattggaatagattctcaactggtactgtcaatgaaattgaattctcaaaggcaaaggcagaattaaaattaaacttattaaaaccagctgaatgtccagtttctttatctgaaaaattagcaactcaagctttcgctttaggttatgtaccatcagaagctgaaatttcagctgaaattgatgctgttaccccagctgctgttaaagcttgggctcaaaaatacttatatgatcaagatatcgcagttgctggtaatggtcaaattgaagctttattcgattacaacagaatcagaaatgatatgtctatgttaagatggtaatcaaagttaacgtttattaaaagaaaaaaacacgaaaaatacattaatgaattctaaacttatttatattattaacctttaattttgattcttatttattcataccaatatttttatatattatattatacactacaaaataaaaacatactacagataaaaaaaaaggaagtattaaaattggtggaatatcattcataaactgaaaaaaatatgccattccttctcttctctagtcttgtctttcttatttatgtattatttatttttatctctttacactaattattgaagcttattattcaaggaggggacagtataagtagtcattgtaaaaaccagttaaactcgcaagatattttatacactgtaaattttccaacatgtagaaaaaaaatattgatgatcaatgttaattcgcatgtaataagcttctaagtaaacttatactttaatcttttaaattccaaggacaaatgcttacaagaaacttattaagatcatcaacaggatcactgaaatcatcagctaaatttcttaaaccattaccacaaattcgttcatacgcaacaggtggtggatcaaataaaactaatcattttattccattaacattattaggtttagcagcaattggtttaacaatttataatacaaataataatacaaaaccaccaactgcatcagttgatccaactaattcaacaataattgcaaatccattattcccatcaaaggattatcctgataaaatcaatgttgtttttgttttaggtggcccaggttcaggtaaaggtactcaatgtagtaaattagttaaaaattataaatttgttcatttaagtgcaggtgatttattacgtgaagagaaaaatactccaggtagtgaatttggtgaattaattgatcattatataaaagaaggtttaattgtaccacaagagattacaattaaattattgaaaaatgcaattgttaaagaatataataaaggtttaagaaatttcttaattgatggtttcccaagaaagatggatcaagctataagttttgaaaatagtgtatctgagggtaaattagttttgtattttgaatgtcctgaacaaattatgcttgaaagattattaaatagaggtaaaacttctggtagaagtgatgataatttagaaagtattaaaaagagatttaaaacttttgttgaaacaagtatgcctgttgttgaatattttgatgatcaaaacaaagttattaaaattaattgtaatgaacctgttgatgaagtttatgatcatgtcgttgaacaatttaaggaaaagaaaattatctaagacattaaaaattaaaatgtaaaaaattgttataaagtatataaagtatttaataaatatatatatatatatatatatatgattaatggacaaattatatgtcttttttgattaattcaaacctttcactgtttttgtttgcaaaggcagaaagatattcagataaattatcaattttcttatagtgattcaatgttccgattgcaactattaatctgtaaagcgattcatcatcatttaataggtttgatagagataaaaccttcttgattatttttaatagtttatggtaaattgtatttattgaaaatttatttactaaaacggaataattcaatattaaggtagaaacagtaattggcaaaaaggtggcatccttattcaaattttcatataacaattcagtgaaaataatatctaatatatcagcatctaacatcattggctcaccccattgtttagcactaaatgtatttattaaaatcctgatagtcatcatttgaattttactaatgtttgattcaagtccagttctaacaactggaataaattttcatttggtttaattttagtaataatagctctaagtatatcaaaagctaagtagtttagaattatcatcccaatatgatatcatttccattgcagattcttgaatctttgagtagttctcacaattgaataatgtttctaagtcaacatctaattgcttatcctctggttgtttggaatttaatttcttaaaagcatttatcaatttatttagatctaatttttcgaatgataaatattttgtttgtggtaaaatatttgatgtagttttggtacttgtgttattggaagaggttgtggtagtagcaatttgtgatttagcaccgataccttcagcatttgttaataaaaactgtaccatttgttgtaaatattcacctggtaaattatttttctctaaaaacttttctgatacctcatatggatcatcagtaagattaactggcagtttcaatggaggtttaccatcttcaatatctacatcaaaaacataatcataaaatcctccattatagaatttctttggtctatcctctgaagaacttgcaatttgtcctatcttaatccattgactatttgtccattgataagttctaatgtaccacttttatttttaactaattttgtttcaccttctaaagtggcactttcattatttaacgaatctacactttgaacatcattcttattaacatcattatacaaagttttatcaattgaagattcctctaattcacgtaaaaatagtgattgttctttttctgttgcaaatcttgtaagcatccttggtaaagattcttattgttttatcagaagaagcaatagcaatatcatcattatttaaagcgattgttttccaaacagagacacaaggaagtgtaatgatttgaatacattgataatctctccaaattctaacagatctatcctcaccacaactaactatatcaccatttgatagaagagagagagaataaataaaactttgatgaccagttaaaattgctttattttggaaagtttcagaatcccaaattttaatagttaaatcatttgagcaagatgcaaaatcaccattaggtaatactattatatcacgtacaacatcatcatgagcaataaaagatttaacttgtttattcttaacccattttttgattgttctatcagcactacaagtaataaatgtatttgaatctaagaattttgcactccaaactgaatgttcatgaccttttaaatcataaagaatttcaccagtatttttatcccaaactttagcagttgaatcccaagaaccactaataatgagattatgtaaagtgtctaatgaacaaatattggaagtatgaccaattaaacaaaattcatcattatcattatcattaaaatttggataaattgcatcaggtgaagttaaattaattatattatcactacctgcacatacaattaaattttcattgttatatctataaatagctaatgaattgacaaacttacttgatttaaagttaattatcgattgatcgaaatcttttaaattgtgattaattctattccaaattctaacagttgaatctcttgaagctgaaacaattgaatcatcatctaaaaaagccaatgatttcacatcatcctcatgacctatcaaagtggtagaaagtctatacattacagtcttgtccttattgctttactttaaaaaataagtataattcatcactatatataactattgccattggaaattaaagatcaactatattaatattgaatgagccctcaataagaggagggcaaataaaaagcaattacgtaatacaacaacccttcctccagtacaccattaataatttatttattatgataaaataatttttacgtgtcgcaacgacttattttaatatagtgcttatttattgtgctatcactatatcgtgtttttcatttcatttcatgccaggttcgaagagaatcatgttttcattgattactgattttacttatcattttttttttgtttacgttcttttgatagttcttttctcatttattagatatcaaatagttttgctaataatgctattcctatcaagaagtgggactcgatgggtcattgttgcaatttcctttttaactattttatatatcattacaaaccattcgtctaatatttcaaattttgatgcaaatgatctgtttaatcaagtatctgattatcgtattcaatataataataaattaattgcagaatcagaaaatactgaaacttcatctaatcatgaaccattaacttggcctcaacttttaaaagctttaacttttgataaaactttatttaaaaatattggtgaagatataagtaaagaaaatatggattttttcagagaagtttattcaaagagaattactgaaccaaaattttcaaaattaacttataatgaatttaaagataataatggtaatcttaaggttttatcaaaagatgaatatccaagagctaatgcaactttattaactttagttagaaatcaagaattacaagatattgtttatactttaagacaattagaagctcattggaatcataaattccattatccttatacttttattaatgatgaacctttcactcaagaatttaaagatacaatcaaaagacatacagttagtgattgttattttgaagttataccacctgatatgtggaataaacctgctaatattgatgaaaatattgaaactgaaaaaattgataaattaaaggaaaaaggtgttcaatatattgataaagtttcttatcataatatgtgtagatttaattcaggttatttctataaaatggaaagattacaacaatttagatattattggagatttgaacctgcaactgattattattgtaatattgattatgatttattcaaatttatggaagataataataaaacttatggttttacaatttcattatatgataatcctttaactgttgaaactttatggcctgttactttagaattccttgaaaaaaatcctcaatatgctcatccaaatggtgctttccgttggttaactgaaaatgtacaacatcctgattataatcaaataactggtggttattcaacttgtcatttttggtcaaatttcgaaattggtgatatggatttctatagaggagaagcttattcagcttggatggatgctttagatgaagctggtggtttctattatgaaagatggggtgatgctcctgttcattctgttggtttaggtttatttgaagatagatctaaaattcattggtttagagatataggttatcatcattctccttataaaaatattccaaattctgataaatgtagtgctcctgaagattcaggttattttgctccagaagatgttcacgatcaaaattgtttaagtaattggattagattggaaatgacaaataaagaattacaagactattaatctttacattccttatcatttataatataaactacactatatatattgtatttactacacatttaacatgacatttttcatcctttgtacgttctaaagaacaagtttatattccactaactacgatgtatagcacgtactttcattatttcagccgcatttttcatacatgtgtttttccaaaagtctgcggcggtgaaaaaacagaatcactttattatccttcatcgattgatgaactgaataatgaaatgacattattaaaatttattatactatgtcaacaattgacctatatctgcactacgtattaacatgacagccacatgtcacaaaaaagtaatcattgagtgatgaaacaaaagacagaaattttacctgcatacatccaatttgaaaaaaaaaaaggtttcggggttattcaaacgcaacgggttacttcaactgctgcactgttgtaagttattgaatatcataattccgaaaactaggtatatagattcaatttacttgactatatggtttatatatatatatatatatacgaaaatacacagttcagtttgacaaattaaaccagaagtggtattcattcaactaaatatttatccatatcaaaccaatgacgaaaccacaaaactactgcccagttatgatagtttagttctaaagatagaacaatagaacatataattataatatggaaaaatcgtgatctcaattgcatcattaaatcggctttgttttcgtattgtttcaaagatttcacatcataatcatcatggggtagtaccttttttatatgtttttttcgtcaatttttacacactttaataaacgccaggctaagatgtacaataagtacttagctgaagatagctgatgtattaatttgtcacaaaagcatcaaaaaaactcaaaaagatgcatcacatttttcaaaaaaattatcaacatttcctattcaggaagtcaaaggaataattatgaaattcagaaattacttctattttgaaatcttgttctctgaaaagcatcaaaatactccgatctgttaaaaatttacctttgagttcctaattaagtaacgattcacataaattcttattagtgaattatttcggcgttattgttgtttcttattttcttccttgtatcaacaacatgaaacacggagaacttcaaattcattcttaaatacgaaatttttcaaagctacttaaactgatcctattttccaaaattaaatgttcaagttacttgtcatatggagttttcctttggttctgaagttattttaaaagacttggttttctttttttactttattttatttgttgtttctttcaacaaaaaaaaaactttttgatcaataagcaatgttgtttaacaagatttttagcacaacattatttactgcaatgtttgcggcagctgccaacgcagttggcccaacagatggttatgaagttacagttaccaacgacaatagaattcaaattgatgttccaaccgcaagatctccatttgattatcttttcatttatcaaattgatgttccaggtacttatctttgggatataaatgaacatagtacatattaccaatgtacttctgatactgattgtaccccttttgatccagctgattatgaagatcttggatctaattggtttttagaagcaaacttaacttcaaacccaaatgatggttcttttgtcagatatgtctctccatctcttacttatcctcaatacggtgttttctctgttccaattggtgttcttgctggaggtcctcaaatgctttatgaaagattcgttgttaatatttacaaattagatccagcttccacttcacaatatacttttattccaactactacttgttattatgatgtttgtgaaactacagcaattccgaatgttttaactacttacacttctgatgtaaatggtgctccaactactatcactacttatgaatccctctcatttaaggaagaagttattcaatcatatctaactacttctgaagttgttgttagtggtgtaacaaggcttgtcaccacatattgtccaattactgatacagttacttcaacctcatcttcttcaacttcaacaccatcttcatcttctacatcatcttcatcctcatcatcatcctcatcatcctcatcatcctcatcatcatcagttccaccaactaccattaccacaattgtcactgattgttccagctccactcaacaagccacttgtactacaggtaccactaatgtcattgttggtgactccactgttccagtcattaccacttcttgtgatgttccagatggtttaaccggctcatttgttaatactccatcagcaaccacttattcaaatgaaattactactactgtcatcacagtctcaaatggtattgttccaagctttgtttgcccatcatcatcatcttcaacttctacatcaacatcatcctcatcatcatcagttccaccaactactatcaccacattgattactgactgttcaagctccactcaacaagcaacttgtaccaccggtaccactaatgtcattgttggtgactccactgttccagtcattaccacctcttgtgatgttccagatggtttaaccggctcatttgttaatactccatcagcaaccacttattcaaatgaaattactactactgtcatcacagtctcaaacggtattattccaagttttgtttgtccaacctcctcatcatcctcatcatcctcatcatcctcatcatcctcatcatcctcatcatcatcagttccaccaactaccattaccacaattgtcactgattgttccagctccactcaacaagccacttgtactacaggtaccactaatgtcattgttggtgactccactgttccagtcattaccacctcttgtgatgttccagatggtttaaccggctcatttgttaatactccatcagcaaccacttattcaaatgaaattactactactgtcatcacagtctcaaacggtattattccaagttttgtttgtccaacctcctcatcatcctcatcatcctcatcatcctcatcatcctcatcatcctcctcatcatcagttccaccaactaccattaccacaattgtcactgattgttccagctccactcaacaagccacttgtactacaggtaccactaatgtcattgttggtgactccactgttccagtcattaccacctcttgtgatgttccagatggtttaaccggctcatttgttaatactccatcagcaaccacttattcaaatgaaattactactactgtcatcacagtctcaaacggtattattccaagctttgtttgtccatcatcatcatcatcatcatcatcatcatcatcatcatcatcatcatcatcatcatcatcatcatcatcatcatcatcatcaacatcatcctcatcatcatcatcatcatcatcatcatcatcatcatcatcatcatcatcatcaacatcatcctcatcatcatcatcatcatcatcatcattatcattatcttcatcagcaccatcaactgttccatcaactacaccatcaaccgttccatcaactacaccatcaaatgttccatcatcagcaccatcatcagcaccatcatcagcaccatcatcagcaccatcatcaatttcaagttcatcatcatccatcccaacttcatctagcactccatacccaactactctttctgttccaattactaattgtgaatttgttactgagcaagcatcatgtatccaaggctttatttcaaaatcaattgaaggtcaattagtttggttaacaactacttcatgttcaatgccaactgatgttaccggttcatttggtccatcaactgtcactgaaacaattactactggtggtattactacaactgtagaattaactaactttgttgtaccaactgtcgattgtccatcaaattcatcttcatcatcatcatatatcccaagtactcatacttatacttctgaatcaactgtcactgtcacaactactcattgttcagataataaatgtactaaatcctcaactacttcagttactacattatcatctactactattccatcatcttatggttcatcattagaaagtactttatttactccatcatctactgctccaactactgaatcatctgttccagttgttccaactaccccaaaaccaagtgctccagcaccaaccactccaaccgaaccaactacttcaaccactcctactgaaccaacaacaccaactactccagctgaaccaactactccaaacactccaactatttcatctgaatcaagtactccatctaccccagaaccaaccacactttcatcaagttcaaaaccacaatctagtgctacttcattcacaattccacctattgttgaacaaccaagctcttcagtttagtttctcaaccaattcctgataccccagaatctatctacgatggtagtgcaaataaaattcaaaatggatcatttttagctatcatttcatttgctctattattattataaatttaatttgtttttaactgttcttttattttagaaattaatttgaaaactttacattcttttatttactttccatacgtcgttatttttgtgcaatattctttatagttttagtaactcatataatgatataaatcattaacaaatttatcatagagtacatccatctacattcaattcggctgattaggtaatactgtccacctataattttaatggaaattcagtcggaactaaaaagaaaaattatgcttacgcgacaccaaaaatagaaaacgtcttagacatatttctgtcatttataaaacatcaacaagttattgtttttttttctgtgatcggacgttattaataagaatatactatcgtcaaatgtcagtgaataccacaaccacagtgacggatgaacgtccactaatagagttaattcaccgtccattcgatgcttgatttaatagatagtagtacgttaacatcattccctgatcctgaaattataaagaatcaaataaataaaacaaaatcaacccctttaatgaatagttatgaatctgaacatggaaggtcgatagtttccaattctataattaagtatagctcccaatttctcgaatgttcatacacccttttcatctgttgataatggatatgattataaaataaataattctaatgtttctgaagatgaaacatcctatgggagagactataaggatagacgataccgacaatgcaaagtaatggagattctacagattttatgaattttagggaattaaggatatttcacgaagaagagaacaaatttgaaaaagttatacaaaggttaagacgtgttgaaaggaatgatttaaaaatacggcaatctattggagattttagaccgtttatacaaaaggaaacgatatgggtacgattaagaaagttttttaaattcgataatttataaatgaactaataaaagataacgataattaatataaataaacaaattttgaaaattaagtattaaaaattaaattataaatggaaaaatgttatatatagagttaactgtaaaaatataaaaatataaaattaaaagttattagtaaattaaaattaaattaatcagtaaacttgattaatttatctatgcgactggtgacttacaagtgaaagaagtagtagtaccatcttggaaagctgactttaaggacattgaagatgaataaatacctaaaccagcagttgcaagagaagctaagaaaagaataatatgaactggtgtttgcaaaccatttttgtttgtaacctcttgcccatcttgaaaagtttctccaagaatcaactctgtgagtaattttattaacgtaatcatatggttcatcaccaactaatgcaccaagttgaatatctaaaccgaattgtaaaatgaatgggaaagtataactgaattgtaaaatacagacagcaccaataagagagactaaagaggagaaatttggaattgcagcagcaaagacgaatgcaattgcccaataaacacagacaaacacagtccaaatccaacgaccgattttagctatttaaacttggccagtggaagaatctttggaaaatagaattgtaagagacacttaataccaacattaccatataaaccagctgcaatcaatgcagagactaaattaataacattagtagttgtttgccaaccatattcagagataccttggtttgcaggattaataacatattgaccttgatatttatagacgaccatagcaaagattaagtaaattgagaaaatgaacatttgagctgcagccatacctttccagaaatcccatggacgtttcatttcagacatgaattcaacaaagactaaagcaccaccataagaataaacaatattcatacatgcgtttaattgattttggaattgttcatttgaaccaccactaataacaacatgagttaaaactggacctggagtagtaccggtggtacctaaagcagcaacataatttggaccccatttagagacacaagccatagtagcaataatgacaaagacattcatccaaattgctgcatttgctaagaaaccaaatttagctaaagatttaatttgaccaacaattgcaccagcaattgcccaaacaaaaattaaaatagtataacaacctttacctttagcaatttgtgataaaccttgaccattacctaaaataataactgcaacattacagaaaagttgaacagattgaaagaaatcaattgaatatctaacacctctaccataaattctaccaacaacatcaccataatttcttaaaggatatttaattgaatcaagtaataaaaattggttccataataaaacaccacaataagcagcagcaataccgaaaaggaaataaagaagagcacctggaacataacctaattgagcaattgcataaggagcagaagttggacctaaaatatctgttgtgattaaataaaagaccgaaccccaagaagcaattcttaacattctatttgcattttcctttgaagtataaagtggttcagagattaaatcatcagttgtttgaactttttcatcaattttatctaatgaagcaacatttgaagaattttgaatagttaaagcttcagtattacctgcataattttttggttctttattcaaaagtttagttctaataacttcccataaaggaatagttggagcatgcttcaccataatctggagatttttcaagttctctttgaagttttgcatgatgaagaaattcttctaatgggacatctaagaattcatcgaaatcgtcattttcaagagcaaagttatctaaagcattagcattatttgagattatattagaaataactgatcctggactttgaactggtttaagctcagacattgtagattgagtgtgctttgataaaaaagagaatttaaaatagaataaataaaaaaataaaaataaaggattactgagatgattagagataaaaatttttaaaggaaagtagttaagcttttatacaaacagaaaagtagataaacaaagtgttttcttttcgaaataagtatgacttaattaaaatttatgtaaattaaattaaattaaattaaattattgataagagataataataataaaccactgaaaaaagaaaagcttccaccagcagaaaagcacaaacaaaacgtatagccgtatggttctcacaatagaaaaacagagataaaatgagattaactagtaggaaattactttttccacattaacgaaagttaaaatttttttgacacatttctcacctagccgtgtattgatacggccaattttcttggtataattttaataatagttgggcataactagctcttagctcactgtggttacttttactactttgttattatttacagttgtattaccaccatcggcccgtcacaggaatgactgaagccgtatgttattaataactgtggaactacagttcatatacgctaactatagggatattaacaccccattaatgatttccatgtatagtgaggatacacacctataagttttacaacaaaaaaattatttaatgtttacatttaaaagttatatagagggccgtgccactatatgcaatctacacataagatttgaaaactgtttttttcttatcctagtgttttattactataaactactgtgtagactatacttatcaccattcggacttgttatttccttatcagaatcttatctactccataataaacgtttttcttttatgctcttactatagtaataatattctcttatcagacagtaaatttatgccagctgctcataaggaccataaaaatgggcatacaccccctgattatgccaaactcttcacaaatcgatttgttaaagctgctctgttattcgtctatttttttaaactttcttcatatctttcttaggtcgatttggaaatatattgaagaccgtaaatgacgccataataaaagaacttattttcccaatcgggaaattgctataggattccgaccacactgtgtttccatcggtttaattttacttgaaggtgagccacggagactctattctattcatcaaatcccacaagagtgagtgtttgcgtggtatgcttgatagtgtgtaatagtttggtgccgtatatatattcatatacaaattgcatttcaattcaaattaatatagctaataaaaccccgaattttttttccccgaattttcttcaatctggaacaacagaaactcttggagatgaattaatactgatctcaacttctggaatattctcttctgattcgtgaagagacgacgacgacgacgatgatgatgatgatgatgataatttaggtgggcaaaatttactatgaaagttaattacgaagaggtttatactctaaacttctactttcaaattcttgcttaagtattgtgagtacacaatcagaaattttagtataaaactctttttcaagtgataaatcatcagaataaagagaaatatctctatctggtaaatccatttcatcaaattttctctttgcacgtatttgatatcccaatttatgtaacgatttaccattgactgttctcataagaaaagtgttggttgtggaaattctttcattttgtgctctttttaatatcacttcattgacttgttgaatatcttcattgttaagttctaaaccatctactctaaaattcctcactgttaatatctttcaagccttccttatgttccctttgtgtatcattcattggttgagaatatatttttgtttcaagagctatcacaatagtaagcgcaaatgctctaatgtttatcttattaactctaatcttaatatccttgtaaatactccgtaattcacattgcatgaatgctttcttacaaagagtaattgtttcttaaatcatcaggctccaacttctttaattcatgaaggtaattttgccttaaaagcttcaatccatatcaatagcatatcttttaatcttttacgatcaacactcattttctattgttgggtttgttctaaagtattaaaagaaagcaaattaaaaaaatgctcagctacttgctaccatttaccctataaatcttaaattaaatcatttactcatctgattacgtaaactatatgcacttcatccactataactaaaattctaattcaaatcttataattaagatttcttaaaacgacctgttaaaagaactatatagtatactaccatactgcgtataaagtacatgctatcaagtctagagtatagaaagaataattattcgtacaaatgtgtaaaaaatacatgcactcttctaatataaacatttattaatttgaaacagtactgaaacccgcttcccgtagctttgaaaaattaattttttgttaacatgacatcgacatggccagtgactggtaactttttaataattccctgaaatatttcttttataataaacaaacctcatgccaaaatacactaaaccaacgacccagatagatcagccttactattcaggggataaaacatccaacaaaacatccaacaactcctctaatggtttatccatgttccaaaaaataaaaggatttttcaataagcaacaactaaaggaagaaccaaaaataccatcagcaacaacaatcagcaacaacaaacccaccatacaaagctcaattatacgacaaatctcaacaattccaacctttacaatatttaaaacctaatggaaaatcacaatttcattcacaaaataatgtaagtgttgcggcaattgatttatcaataaattctaatgtttcatttacctctaaaaatcctaatgatacactttctcaattcttcagtaaaaagggtgatgaaccattaaatgatatagaaattgaaggtgttttaagtttaataaagaaatcacaatcaagacaaccaagtcgaaatacttcaatgtcttttgctgatatgaataattcaacaatattaagaaaatcttcaaataatttaaaagttcctgtaaaaatcaaaactccaacatttatttcaaaatctagaaatgtaatctagaaatgtttcaagaaatacttcaatgaatcaatcaatcaataattcaatgaatatgacaacttcatttcttaataatagtcaagttcaaaaaagaagaatcgtaagttacacaaatttacaatcgccttataaatcaaaatcatcactttctgcattcttagaaaagaaacgccaaaaggaaaataaggaaaaggataaattagtttataatggtggaactattgatttatcaaatatggacaaaactccaactccaactcttgaaactcaaattaacgagaaatcaaatattaaaaaaggtaatgatgttaaagaacctactaaattaagtaagactgcaactaaattactagatattttagatactgatattataacagttgatgatgattcaattactgaaattgcatctacttcaaatggtaaatccgatattatgaaaccaatatttgaggaaaaggaaaaggaaaaggtgcaggaaaaacctacattaaaggaaacaaaaatcgaaacttttgaaaagaaacaacctccaatgttttcatttgagaaaaagtctgacgtaaaacctgtatctgaaattaaagaacctttctaaaccatcatttgaaattaaggaacaaaccaaacctctgtttggaaaacttgatgttgagaagcccacttttaataatgaaaaaattgaaaaaccaagtgttgaaaaaaatgaaactgtatcattatttggaaataataaaggaaataattctttctttggaaacaaagaagattcaaaactattatttggaaataatatacatacaaaaccactttttgaaaacaaagcagatacaaaaccattatttgaaacaaaacctatgtttcagacaaaaccatttgagaagaatgaatctataaccgaagaatttgaaccaactgaaaatatatcattatttgcaaaagaaacacctcacaccaaaaaatcaagtactgttttcagtttcaaaccaaataatattgtcccaccaacaacagaaaaaccattctcatttaatttttcagcatcagaaaaaactaaaccaataataccaactaataataaacttgaaatttccaattcatcatcacaaattccaacaaaatctaatgatatcgagcatattgactctttcatctttccagaagttgaatctccaaagaaacaaataattaatgaagagccaaatgatcaaaatgatcaaaatgattttaaattccctgaagttccacctgcttcaccatcaaaattatcaaaaatttccaaaattgattcagaattgtactctaacgctttcactttttaatttgtttaaatagattatatagaaaaatttaataaagagtgtattatatactgcatgctattatacaattagtttagctgtaatgataacaacagttttatgaacaatagaaactgacccggaaatttgaaattttaacttctcaaaatggacacaaaactctgcattcaatcacctcaactaattatatatactctcttattttaactaatggctatcactgctgcacaggtgcgtaatgcaacaccattcaaaccaacagaatcgtttactattaaattagatgacgattccgctgagggaaaagaattagtctcattaaagacagtggaagatcctgaagaggaagaatattttcctggtaaaaagaataagtcaagacatcgtaaaaagaagaaacaagcaattctgaatgcaaatgaaggacaaacaactactgaagcattgaaaagtaatggagttcataaaatgccactttataggaaagttacagcaagtgaaaagaaacaacgtgatcaatatgaagaatttaaagatatggtttcacctgataacgatgatctgaatttaccaccacctaaatttaaaaaccctgaaattgtaccaattgaaaaagatcttaaatcattaactaaaactaatgctgtaaaaaagggtggattaccatctcaattagatatgtttaagagtattggtggtaataactaataagaataataataataataacggcaataataataatgatggtaagcgtggaaatagcagtggtaaaggtggtaaaggtaataataagaatcaaaaggaaaattatgatgatgcctattacaatgatagaccatttaacacatccagcaataataacaacgatccttattataatgatagaccatttaacacttcaagtattaataataacgatccctattacaatgacaggccatttaacacttcaagtagtaataatgatccttattataatgacaggccatttaacacttcaagtagtaataatgatccttattataatgacagaccattcaacacttcaagtagtaataatgatccttattataatgacagaccattcaatacatcaagtggtaataataacaccaataacacttcaataaacaccgaaaaagaaccagttattagtcaaaacacagaacttgttccagcagttacagcacaatccaaccctgaactttcagcattactaagtattttaagacttgcaatggaaaagaaaatgcgtaaaaagaaaggacataaaaaggcatctgaattatcaagtaatatggatttaatgagtctagtacaaaatacattattagatagtagtgattctgatagtgatagtgattctgattattcatcacgtagacgtcatagacataagagtaagaaacatagaaagcataaaaaacatagaaaacatcgttattcagatagtgatagtgatagtgatagcgaaagtgattcagaaagtgattcagaaagtgatagtgatagcgattcagatagtgattatcataagaaatctaagaaattttcaaaaagtaaatctaaatccaaatccaagtcaaagagtgctaagaaatctgaggataaaaagtataagaagaagatgagtaagtattatagtagtgaatctgaagaatctgattctgaaattgattccgatgattatagacatagtaagaggaagagtttgaaatctaagtcaaaatcaaaatccaagcctaaatctaagaaatcaagacatcaatctgaaacatgattctgaaagtagttcagaatctagcagtgaatccgatagtgaatctgaagataagaaatctaaaagcaagagtaaaaaatcttccaaaaaatcttcaaagaataaacaagaagaaaatggtaagaaagttaaacattccaaggatgttgaatatattgttgaagaaattgaatctgagaatgaacatcaacctacgattaagaaaccaatgcttttagagtacgaaagtgatgcagaacaattaaagaagaattcaaaatctaaaccaaacccgatggattcaggatctgaggattactctgaatatgaaagtaacaagaaacctagttcaaaatctaaaccaaatcccgatggaattcaggattcctgaggatttcagtgattacgaaagtaagaaatcaaaaacaaagactaaatcaaagactaaatcaaaacctaatccaatggattcaggatcagaagatttctcagagtatgaaagtaagaagaaatctaaatctaaatcaaagtcaaagagtaagagtaagagtaagagtaaaccaaatccaatggattcagattcagaggatttcacagattacgaaaataaaaaatccaaatctaagtctaagtcaaagagtaaatgcaaacctaatccaatggattcaggatctgaagatttctctgaatatgaaacaaagaagaaatcaagttctaagtctaaaccagatccagttgattcaggatctgaagatttcacagattacgaaagcaagaaatcaaaatctaagtccaagtctaagagtaaatcaaaacctaaccctatggactctggatctgaggatttcacagattacgaaagtaagaaaaaatctaaatctaaatctaaatcaaagtctaaatctagttcaaatcaagccaaacccaatggattcaggatcagaagatttttcagaatatgagagtaagaagaaatctaagagtaaaagtaaatcaaaatcaaaatcaaaatcaaattctgataatgacgatagtgatgatgatttttattcaaagaaaaaatctagaaaaagtaagaaataatttttccttttttataaacattttttataaacattttttataatttaataatgcagtagttatggaaatagattttttttttgtagtagaaaagattataaaggatatatatatttagaaaaaaggagggtataaaatttccaaaaaagaacaaaaggagataggaaagaggcttaaaaacaaataacaaataataagaatagtataaaatgtatgtagtaaataggggtattggatgtagtttaattgtgcttaatcagtataaataacagataaaccttcttgaattgcagttgcagctaattgaccatcatatgaaaatatttcaccatacataattgatctgttttcaccagcttttaaattttttatattataattaaaatattcaaaagtatcaatttgattattaaaataaattgtatgatctaaagaaactgagaatttagttgtaaacatttcatgtaaattaagtctcatattagcgcttaagaagaaataatctgaaatataggcaattgcaacataattaaaaattgaaggatttttcaatttatcctttgatttaatccaatatcttaaaactctatcagaagttaatttatctctttcctcatttgaaattaaatcttgattaaacatatcatttggtaatttccaaataaaaggttctctattataacattttataacttcatcttcacaattttgaccttttaaatattgtaaatgaggtttattcattgcctttttagaccaaactttaaataattcaccttgagataacatattatcaggatgatcaatatctgtaccaataattggagcaattggattatgaaataattgaccattcatatttgaagcagaaccttttaaattaattgattgtaatgaaaccattgccttaaatataagacgatcattttgagataattcaacttctacagttgaataatttttacttgattttaaaggtataactttataatataaatttggagttggttgagctgcatgaaggaaatgacaatgaattgaaattggtttccaagtattttctaaagaatttgaataataaagggaagctaaaattgattgagcggccattgtaccaccaaataaacctctaccacgataaggtataaataattctgatttatttgtaaaagtatcatttgaaatttgaattaaatctaataaagattctaatgaagattccttttcagggattaaactatcattatcatttgaaattgaaattgagaatgaagtatttgaagatgaatcagataatgagtcatcaatatcattataattatcattataattataagcctcttctgaattaattgaattataggtattacatttagataaattcaatgatgaattttgatcatctttatttaaagtatgtaaatgcatgcgattattaaaggatggagattgatagttgaaggaagaattagaatgagaataagaattagaataagagggaaagaaagatggagtgtatctaaaacgaagaagagatcgtagaggatacatggttatatttattgagtggcaaattgtttatctattgatttgatctgtattgtgtactgttaatagagtgataaaattctttacacagtgaagagtggggtttacactataaaaaagattaaaagagggagagggagagggagaggaagtgggaaaggattttaatgtatgtgattatgtaatgtatctcttatctattagaacacatgggtgtatctatttattatctatcgatatacctgtttattatctatttacatgatcctatatacacaataatatcattaatcacgacgtaaaaatgcttgaaatgcttcacccttaattgctactcgccccacggattgtaactgtgatttacctgccttttgctttgcaagtaatttcttacgacgtgaaatatcacttgcatgtaatttagctaaaacatctttacgtcttgccttaattgtctcccttgcaattatacgtccatttgcccttgcttgaattataacttcaaattgttcaattctaaggaaatttttcaatctactaacaaattctctaccacatttctcaatttgtgatttatgtaaaactgtacttaatgcatcaacactctctccattaactaataattccattttataaatatcacttaaataatatcccccatcttcataatctaatgatgcataacctcttgtaactccctttaatttaccaacaaaatcatcaattaaatgtgcagttggaattaaacatttcattaatgtttgtccattacttaaatattgtaattcattattcatacctctattattttcacataatgtcataacggctcctgtatattccttaggaaatgtcattaatgcttcaacatatggttcacttaattcaataacttgacttttctttgttccatcaggaaattcatcaggattaataataattttttcactaccatccttaaatttaactttatatggaactgttggtgctgtaataattaaatttttaccatgttccttctctaatctctccttgaaaattgatgaatgtaatgatcctaaaaatccaagtttccatccttgtcctaatgcatttgatgtagttctttggaaaacaactgatctatcatttaaaaataaatgttgtaaactctcttccattttcttaaaatctgtaccatcagctgggaatgctccaacgaaaaccattggtttgggttcctcaaatcctgctaatgcttcaactttactaccaactttacgtaatgtatcaccaactgatactttatttgcatccttaaatcctggtataacatatgcaacttgtcctgcaactaattcgggtaattcccttctatctggatacattataccaacttctttaatatcatatttttcaccactttgacaaaattcaactttatcacctttcttaattttaccatcaacaacattaactaacattataactccaacatatgaatcataccacgaatcaacaatttgtgctcttaatggtttctctctatgatatttatcttcatttggtggtggtatattttcaataattttcggtaaaatatatttaacattaagtccattttttgcactaacatgaacaatatcatccctaaataattcaaatgtttcctcaatttgttcctcagctctattaatatcagctgtatctaaatcaattttattaataattggtattaaatgtaaattcattgaatatgcaatataaaaatttgcaacagtttgtgctttaataccttcacttgcatcaactaataataatgcaccttgacatgatgcatatgatctaacaacttcaagtctaaaatcaacatgtccaggtgaatcaactaaatgaaacatgtaatcctcacctttataattataaatcattgaaactgtttgtgccttaactgtaatacctctctctctttcaacatctaatttatctaaaacttgtttattatcaactgttggattaacaactccagttaattctaataatctatcacttaatgttgatttaccatgatcaacatgtgcaacaattataaaattacgataattctttagtggaattttacttattctttcatataattcactattatctaatattggcgttggattaatcttattatcaacattatattttaaatatcctttatactcatcagaatgtggagttattaatgaatcttcaataccttcacgtattgtacaattatttcttattgctattcttattctagtagaatttcgaaatccattaaatagattactacacctcaatcctcttaattgagatctaaccacattgatcatcattatctgatcaacacacccgtctctaataaaacatcaaaagaccttcctaaacttaccactgaaaaatttatctcggtaataatatttttcactgtcttttcagcttagtagctacaaagaacattaacatgcatatctaacttgattaattttaaaagtacacaattgtaatacatagttactgtatattaacaacatcataatcactctcccatgtatcgtagcacaacaacaacagaatcccctcttaaaaacattttacttacaaacctttcacgcataacctttgatttactatcgttcttaccattaccattactactctcactccacatctctttaacattctccaataccatattacaatgtttatcgaatgctttcaccgtacatattaatttatgtccatttcttaacgatataattattgaatcattatttttaactgcttgtgaaagtactctcaatggcccattattaaattcgtaatcttcatcatctaatgatacactattattcttcactactccgcctgtagacatggttctatctttgtctcttattgatcaacaaataagatataaactttagtattgtaaacttatacagaagagtaatgttttcgcctctttagaggtgagcattgttttttctagactttaccttggtgtatattttgacttctatctgacatttctttctttctgtaaatatcatatacatactgacaatgatattaaatacaattacacgtcgatcaatgttttggaagatgataataaattctaataacaaaggtcaattacttcaattacaatatagattacaattacgatcgcagtggcaacttaagttaaacaatcagcgacgtttgataacaaattcttctaaactggataatccattactttcaaataataatataataggatctaaaattggtggatcgaataaattagggttaaataataaaattgatgatattaaggataatgatttaaaaatagataatgaagaaataccaactttaagtgaacttgcagatgttaaaccattatatgaaactgatattgagagtaaaaatcatataaaatcaaaggataatattaaaaatattattaaagaatcttaaaagcttaacaatataacgaaaaatacaaatactacaacaactaatatacctgaaccaagtgaaaaatttgagttgggtgataatatacccatggagttcttttttgactcttttaaagtagtacaagaatttaaaagaagtggatttagtgataaagaatcagttttattaatgaaatatacttatcatgtacttgaggaaaaacttaaatggattaatcttaattactcacctagagttgatttagagaatgaagcttatttatttgaagctgctcatagtgaattactgtttgaagttactaattcaagagaaatttcattaatggatttaactaatgcaattattattttaaagagaagttttaataatttaaatgatgaaacaattgcacaaattaaattaaatgatgatataattaaaatggaatctaatcaatttaaacatgaaaataatttacatcaaaaatcacttaatttaaagaattctgatcttaattcaagaattttaagtgatatggtttcaggacttaaatcagagattgaaacttttagatggcaacttacaagagctggtattttatcaattacaattatggcaatacttattatgggagtttggaatttaaataagagattagcattagaaatcgaggaagaaaatcaaagaagtcaaaagggaccactgttgataccagttcatgatcaaactgatgaagaattacatgattatgaggcagattgggatgaaagggttactgtgtaatcaataatttatgcaataaaatactctataaatgtatagttgtccataacataatacaatatattattcttattattattcttattagatcagtataacttacaaagatgataacttagtaagatagtaagtaaactcgcttgtaacttcctcactgtaaaaattaatagattgattcctctcgctaaaagtttccgttgttcgcttattattacccttaaactgatgacatgtcaaactgtttataaattaaatggagattagctgattttccacaacttatattaatagtttaaattccatccatcttctcttctttccttctttttaaatcaaaaatcaattctttctctctgtaaacaatgttatcaagaaattgtaaacaagcaattaaattatcaagaagatctgttaagttcaatacaattaacaatcttgttaaaatcaacttaattaatattggtaaacgtggaatttcaagtaatgcacagttaggtcatttcgaatctccgcgtcatattaccaatgaatatactaaattatttaagaaggaagatgttaaagattgggaattattaaatcaagaaattaaatatttctctgagaatccagaaacaattccattaattatcaatggtcaagaaatcctcaatagagaaaccaagagaattatcaatccttcaaatattaaacaaaatttaggtgattattgtcaagctaatgaacaagatgttcaagatgcaattaaggcatcattagaggcaaagaaaatttgggctaatatgccatttgctgatagatcagcaattttccttaaggcatcagaattaatttcaacaaaatatagatataaaatgttagcagcaacaatgttaggtcaaggtaaaaatgttttccaaggtgaaattgattgtattggtgaattaatcgattttttcagatttaatgttaaatatgcttctgaattatatcgttcacaaccaattgaatcaacaactggtgtttggaatagaactgaatatcgtccattagaaggttttgtctatgctgtaactccatttaattttactgccattgcaggtggtttaattggtgcacctgcattaatgggtaatacagttgtttggaaaccatcagattcatcaattttatcaaattatttattatataaaattttaaaggaagctggtatgccagatggtgtgattaattttgttccaggtaatccagttaaaatttcagaaattgttttaaatgataaaaatttttctgcattacattttacaggttcaacaaaagttttctcatcaatttggactaaaattgctgaaaatgttggtaaaggtatttatagagatttcccaagaattgtcggtgaaactggtggtaaaaatttccatttaattgataagactgcaaatttagaaaatgcagtatttaatacaattcgtggtgcattcgaatttcaaggtcaaaaatgttctgcaacttcaagagtttatgttagtgaatcaatttatgatcaatttaaagaattgttagttaagactgctgattcaattcaaccaactaattgttctgaaaatttacaaggttttatgggaccagttattcatgaagcatcatttgataaagttacaaatgcaattaaatcaattgaaaatgataatgaattaactttattatcaggtggtaaatttgataaatctgaaggttattttattaaaccaacaattgttgaaacttcaaatgttgatcattcattcatgaaaactgaatttttcggtccattattgactattttcaaatataaagattcagaaattgataacattctagaaaaaattgataattcaactggttatgcattaactggttcaattttttcaactgatagagttaatataaggaaatatgaagaaaggttaagatattctgcaggtaatttctatattaatgataaatcaactggtgcagttgttggtcaacaaagttttggtggttcaagattatcaggtacaaatgataaagcaggttcagcagctttaattacaagatttgtatcagttagaagtatcaaggaaaattttggtgaaattaaaggtcatttaaacccatcaaacttttaaaattttatgtaattaatagtataaattcaaaatatagtttatagaaataatggattttagtaagtaaagaacgtaattgaaatgaaaaattaagatagaaaagaaaatcacaaaaacatcacgtatatattattaatgtataatacaaaacagaaacccaaaaaaccaacccataatcatgtatgcaattttgctatactatttctttttttctctgatagtttagaactggcctatctaaacaattttttaaataactttttagttttagaaggttcattagcattatcaacaatttgttgttgttgtttattatcattgtcaatggtatctttggtattggcattttttgatttagaagctttaacattaacagcagataatctgcgattatatttctcaaaaagctcttgtttttccttttgatgaactgaatatggatctgtactagtgccacttgtattagatttctttttcgataatgtataattattttttaatggtgtagtagtagtagtatcatcatcatcactatcaatgactccataatcatcagtagaggagatatttgagctagttcttgaaagattagctggtttgtcattatttaaaacatctaacatactttttcttctcgtagttgttgatggtaaataattattactattatcataactaaaagaacttttatttgaagttgaatttgatgttgggtttgaaatatttaaatcttgtaatgttgtctcatttaaattttcaaataatgaagagatagcagtatcattagttttcactttcgataatttttctgaataatccaaattaagagaatctgttgatactgatgctgatttttttacaggattaaaatttggggatttttcaatctttattgaaggtatggtgttattatttgttgatgttatattttcatgaaagggtaatttaaaattgattgttggttcatgatttattttagaatttgtatgcgaacttgtgcttacatttgtatttgatgtattattaacattattattattattcttcttggaagatttaaaagcagcaccagatgcataatcattcccaacatagacaactgataataattttttgtttggagtaaatatagcagttgatttagttttttcaatattttcaccaattataatcaggcttggttgataaagatttaatacttcatttaaataattaaaacttttaaagaattcaaaattaatattgataggtacattatttgattctaaatgagataagattaaaccaacaaaagaatcaataaaattattaactgaatcattaatttcattacctaatatggaagttgataaggagcaacatattacaattgtatcaccctttgataaaatatttttaatataataattaaagcaagataaagatgaagatcgatttgatagcaaaataaggtaaaatttattattaatatcattatttgataaatttgaatgtttaaaattaatacaaattgaatttttagttataattggctttgttggataatcttttaacattgaaatattaactaaatttttaaaactatttgtattaatattatttgaatctaaaagatctttatcgcaattagagaggggattatttgataatcttgaagtaacattgaaaccgtaacttttttgaaagtcaagtggatctgatattaaattgcgaatccaaagcgagtaattcagaatcggacatttccgaatatgatttcttgcgaatgttgttattgaaggtatttgaggatttagatgcattagatgtaaattgtgggtcattattgtcgttaatatctagactagttaaagatgaattaagaaaagaatttctaacaccagaaagaagactatcatttaaagtatcattagataagggcgtagcagtatttaaattttttcggtcatccctaatgttatcgctatcagtaattaaattgacacctttattgacactattcgctaacaatggctttttcaatattgaatgggtgggtaatgtggacgggttgtcggaatgtcccttgctatttggtggagtggctgtattagatgtattagttgtggatgtagacgtggggaaaaaatatccattaggaggctcaacaggtgctgaagcagtacttggtttataattatcaaaggagactcggcgagcaaaacacgacggaactggatctagagatgtcatgtaatattgtagtgtattaggatataatataataaaaggaagagtaattattacaagagaaaagaagaagaataaataaaatataagcagtaaatcaaagtaaattatagtaatcaacacacatgcatgtacactaaagaggtataatttataatttataacactatcacactataacagggtccaccctttaaatttgaaccctttagttatataaacctttagccttcaaagccttcttattttttattttttcatttttttagtttttaaattattttatgtgacagacgcaacgacgttttactattttattatctatttaatttaatgttataaagattaagatataaagttaataaaacatttaagcaccaatgacatcagcatcatacttagccttgaaccagttgattgaatcagtttgagaaaccttgtggtatttaccaacggtacctctacatctctttcttctagcaactctgaaacctgctctacccataacaacgaagaaatccataccgtaaataccgatatttggatcatatttaatacctaaatcaatatgttcttgaataccgaaaccgaaattaccagttgatgagaaatttcttgcctttaattgatattctttaacttttaaacctctttctaaaatttcttctgcctttggacctctaacggtaacatgaactgaaattttttcatttcttctaataccgaatgatctaatggtatatcttgccttagattgaactggagtttgacctgataattgttctaaaactttagatgctctggttaatctatcaccggattcaccaacacaaatgtttaagactaatttttcaatctttaattctctcatggagttgttaagtttgtcagacatcttgatttactggataaacttcgttattgtttaaaggagatagaagttcaaaaagaatttaataaaaattaaagtaaattacaataataataataataacagtagtaatactaaactcataaattattcactattaacatcactatacatttcactatagaaataatttttcactcacaataaattaatatgagaaattataaaatgaaaataattattagcaaatttttttaaatttttatttgcgtgcgtcacgtgaggtaatggagggctggagtagccctttgttttgagtcgatcgacctgtacgattttataaaatttatccgtacaccctcatttattattaggtaagatctattatcatgaatttatactattatctacaagggcaaatactttaaattcgtgtagaatcacaatctttatcatatattttatcaattaaaacaatcaattgtttatcttaaaactaattacttatactatcaatcatgtccgttaatgacattatctctaaatattcttataaatcaaatttagataaagaattacttgattataacaaagaaatttcttttaatggtttaccaaatacgataaataataatagtataaattcattatcacctaatatatcaatacctccaatctctcaaccaacagattttttaagagctcatactgatgatgaaacaaatcctgattgttcaattaaaattgctcatggtacaacaactttagctttccgtttccaaggtggtattatagtagctgttgattcacgtgcaactgctggtaattggattgcatctcaaactgttaaaaaagttattgaaattaatccaatgttattaggtacaatggcaggtggtgccgcagattgtcaatattgggaaacttggttaggtactcaatgtagattacacgaattaagaaataaacaacgtataactgttgcagctgcttcaaaaattttatcaaatttagtatatcaatataaaggtatgggtttatcaatgggtacaatggtttgtggttgtactccaaaggaaggtccaacaatttattatgttgattcagatggtacaagattaaagggtgatttattttgtgttggttcaggtcaaacttttgcttatggtgtcttagattcaaattataaatgggatttatcagttgaagatgctttatatttaggtaaaagatctatattggctgctgctcatagagatgcttattctggtggttcaattaatttattccatataacagaggaaggttggactttccatggtaatcatgatgttggtcctctattttgggaaattaaagaaaaggaaggttctttcaataatgttaagggataatgatctctacttctgtggtaatttgtgtagaactattttttctaacttaaaattattaatgctaatagatacggtttttattttatcatttcataatactatattattattataaaaatacattgttaatatacatggtcgacaaaactatatttttatctttttatcttgatgatcatctaaatcatcatcattctctaaaactctcttattatcttctgacttttcagtttcatttgtatcatcattaccttcgttggcattgatattagtttctttattgtctttgtctttattattttcttcgtcttcctgttcgtcttcttcatcatcttcatcatcttcaccaccactatgttcgaggttttcaagcatcatttgtagctcgtcttctcctccttcatcatcttcatcctcatcgtcatcttcatcattatcagctccattgtcactatcttgatctttattactattatcattgccactattaccatcattcatatcatttttactaacttctttcacttcgtttttcttctcggtatcaaccaactcattttcagtgttggtaattttattacttccaaatgcttcagaatcctttacctcttcattgttttcagtatttatatcgttcatttttatttcattatcaaattcatcggccttaacactaggtttaggtactgtaggtttaccaaatttggcaatactacgtttgatctcttcatcatcaatacttttattattcaaacttgaaattccgcttgatgtagttgttgtggttttacccttattataatattgaggcttcataataccaatattactcatacctgaacttaatttaattggtggtttaacaacattatctgtgctatttttatttgagtcatcagtaattggttcagttgttggtttactaattggtttaatcgatggcataaatgatggtttattagtaattggaatagatgaattaatatctttattagtattcatattagatggagttatttcaacattttgttgtttgaatggtggttttggtgtattattagaaaattggaaaacttttggaccacctgcagacggtttagaaactggtggattaataggccttgctttattaataattggatttcctggtttaggaaccattcctgctggtgacgctgaatttatcttagatgttgttccaactgatgatgttgatccttgtctagatgttgaatcaccaggttcttgctttataaatgaaatgggtggagtatttttattttcaggtttagattcagatttgacagttggattctgtgcatttgttgatgatgcattatttgttcccgtaggagtgggtgctggtgtatttgttgacggtgttggatttttaggtggtaaatggggtgttaatcctttttgtttacaaacttgtaaagttgcagcatttaatgcagctgttaaaatctttgtaacatgaccaggatttttatcaattaatgtaacaagtgggaaacctttaattgcaaaatttttagcagcttgatcaacttgtgaaatcgtcattgctaatgctttggtcaaaatttctgttgatgttgctctatcatacatttttcttgatttggttaagaaaattaattctttttgtaaatatgctaatgctcttttagtattagctgacatattatcatttttatttgctgttttatttgacgatgatgaagtagttgattgagttgaagattgtgcaggatttgattgtttgatttgtaatgattgatttgattgggtatttgctgcatttaaactctcggaggtaattatattattattgttcatttgaactggtataaaattatttttactcgtatttgatgtattacttgaagaactcaatggaactttcgtaccacctggagtattcaaatgtaaattaccgtgtaatgccttaggaacttgtcttggtaatgttttaccctttgcctttgcattttcaagttgtttctgtcttgctttatccttttctgcaatcacttcttcattgacaccccataaccaacctttaccctctttagaaatctttctaaatgatttgtttaacgaaagattatgtctaacactactttgccatccatctggacaatagaaataatatggatataaatcttgaattcctttataaatttcagacagtgacatacctctttctgtacctttttgtcttaaacaatcagtaataagaatagaatatggtaagtttggtttatttctatattcttcgggtatttcctctaatgtataaaccttctttttagcctttgcttgtcttttaggtttcaccttatttttatcagctttactcagagtactcatattttcttgtttaatattcaaactattcatatgaagattaggagtttccattttaataaagttgtcattgatgatatcattaggtttgttattcaaattggttggttgagttaattgttctgccgcttgttctgcttgttcactactttcacgggctaaaacttttccaatttctttctcaatttctaattcacgtttttcactatcgagatcaaacactatatctaaaactttaggatctccattagttaataacatatgatcgttatgtaaatctttcctaatttcatcaaaatttgcaactaaattatccaaatgttcaatctgtaactctttatctttatctttgttttctttatctttctccttttctttatctttagttgatttggtggttttaggtttttcagctttcacctttggtttagcaggtttctttgctttggttttaggttttgttttatccttagtagtatcttttactttttcctttactttttctttcttggtgtcttttttggaaagagggtcggcaacatccaaatcgtttggtacatttggagtagaaggttcaagttccttattctttgaaggtagtataaatacaaattcagtttcaccaatttgaatttttgttccatttaataaaggtactgtaacacctttttcaataaaatttccatcaacaaaagcaccatttctacctaaaacacttaattcaaatctttggttaccaaaattataaaacattttagcgtgtcttcttgaaattgccttttgatttcctaaatgaatatctaatgaatcagtagaaggatcaccatcaactaatctacctaataatatttgcatagtttggacataaaatgtaaaggaatcgaaatccatcattgcataagcttgaattttttcatagttctgtgatgcagctgtagatgatgattgttcctgttgttgatgttgtgattgttcatttgatttttcaaaaggttgtaattgatttgatgcgttatgtgaatttatgatattattagtttgattattattagattcagccatacttttagtttttataacatcaggagattggtttaaatgaatagtttcagtttcttcatcatttttagctaactttagggaagtgttatcatgtatattattgggtactgatgaaaattcattttgtgaagttgtttgatctatatccacggacaattctgctacttgattagttagatcattatttgtaaatgatgaatgtaaattagatggttgatgtgtgttaactttgattgcattattttcagaggatgataggatattatttttaggatctggaatattgatagttgtattacctgttacattcgagaaggcagttgtattattcatagttgtattattgatagttgataagttcatagttgtattgttattgttatttttactatcagttattgattgattcggtatatctacatccatgcccatattaagatcatccatattcatatttatactatttatattattcatactaatactcatacccatattcatacttaaatccatattcatatcattaatatcattgtgtatatcactaatatcattcatttcattatgtatttcatctaaattcatattgattggaatattttccatatgtggtgaatcaacaatattcatgtttacattatgattattatgactattattattattgttattaatattaatattagattgattgatatcaggattgtttaaacaattgagtatcaggtatatttaaaacttgatccttatttgaattattattattggattgggatgattcattaattatatctttaattgttgtattatctataatattatgtgtatccgatgaattaatggtggatgtgccctgtgcgatattctcagatgcctccacttgcgacatagtactatataatatatgagttcaaaactaatttaccttataatatgatctactttatcaataggctactatagttaaacctatatttaattaaagaggattatctattacacctaaacacatgcaataatattgaaattaaaactgaaatggaaactgtattgtaaaaaattgcgaaaattaaagaaaagaaaaaaaattaaaaaaattataaaagaaatcgggggaagaaaaaaaaaggaaaagcgcggattttttgtttttcaagactttctttcttatcttgcatagagcatctccttcaatacagctacaacatcaggatgggcctctaagacattgtaatcctctgctgataaccattcaaatggtttaccctccttaactgctgtcagtaacagtaaattatcataactagctaatgaatatggtggtgatccagttgctgcctctaataatataagtcctgcactaaatttatcacttgaatatgtcggtattcgattagtttggaaattcattagttcaggtgcactatattgtaatgtaatatcaggacatttaactaattctttgatttcatttgctgatgaaaaatcaattatcttaaattcaatattttctatatcatcaattgaatctccatatgctgataccattatattatcagtttttagatcacaatgtacagattctaatgatttaagtatacttaatgcatcatttaatgtttgatataatttccaccataattgtttattgatcttcaaatttaatgttgtggaggtttttcgttgttgagaatttattatcgaggtccttctaattaattcctttaaactaaaagacatttttttcataactaaacatggaaattcatcatttggtttgaataattggaaatcatttttatttaaatagtataacccgtaacaatctataaatggatatactctattttcttttttaaaccattcctgttgatattcccttaatttcattgcaaattttgcttcttgaagaatatatttaactttatttttacttattggtatcttaactgctatgttaaatgagctagttagaaatcccattggtagataattgacatgagtaaacatatgcatttgatcctttaccaattttatcctgtaattctaatttaaaaagtgttggatttaattcaaatttttgtaatttttcattattaagtgggtatctatttttgttattaactctatattctgaaataggagggcgtcactggagtgatgggagtatctggtgtattaatttcatcaaacccgccataattattaatctttggagtagtatacaaattatccagaacattgttcatttttataagtattattattattattattataattattataactattttcattatcacctaagctaaaatcataatcggtatcgttatttggatctctctcatggttatagttatcacgagaatagtgtcttgaatcttgtaagaattgtagataaaggcgggagagaaatttttttgtccctgtgtgtattatttatggaagaaatggttaatgaagtgtttgattcagaaaatcgactgtccataagagacagtgatgcattagtttcaccatccattatttaccagttgtttaaatgtgatgtataataaaattaatagtagagcatagtaagaaaagaataagaaatccggcatacaaaataaaaacaagagccttagttgagaagatgcatgattttttttacagactgcatggagacattgaccttagggtgattggtcaagtttatttcattcgacaattgtaaatggcagttgttgatgccaattggttagatacaactctaaataggttaccagtacctactctatgggctttgttcatatttagattgatcaattccctttctattaacacttttttccaagctgatgaatattggcaagtgttagaaccagctcatgcttgcagttttcggttatggatatcttacatgggaatggaactatgggttaagatcttatttacacccaattatttatatgataccttattggattatcaaacaattaaatcttccaccgaatgttgaatacaaatttgttcaattaagccctaaatttatcaatgcactaattagcttcattgggtgagttttatctttatagatatattcaactaaagtttaacaataagaaattagcaatattagtatcctatttgagtatattctcagcttggaattggtattgctggtgtagatcatttgccaactcatttgaactttcattgactattatttcactctattatttagaagcatcacaaatttcaaagtctttactatttgctgcaattaattgtattattcgtccaacaaattcaataatttggatattctatctaccatatgagtttttcaaccatgcatcgtatattatggatgcttcatttattggtagtattgtattagctatagattcatcagttaattattatttttattcatcttggaacttgccattaatagaattttttaaattcaatgtatttgataatttgtctgctttttatggagtatcggatccatcattctactttgttcaagcaataccaatcttacttttgaattacctgatatttttcctgattggaatattgaaaactccttggtcagaatttaagtcattgatgttattctatttatttatcttttccttcatttcacataaagaatttcgtttcatttatccattaatgccaatgttattaacatatactgcatcgggtatattgtcaatatccaataaagtatcaaataaattgatgaaattatacgttttcatcacaataatatcatcatgtatgttaggatattattttacaagatatcatgaaactggggaatatcaaatacctagtataatgagaggaatagtaataaaggaaagtgaaagtataaatgctactaaacccataacaattggattcttaacaccttgtcattccactccatttcaatcacatttccatcttgatggatcagaagcacaaatatggttcttaacatgtgaacctccactttcaacaaatctaaaggatggtgttactgttagtgattatatggatgaaagtgattatttctatgacaatccattacaatttgttcaagataatttcccagattttaatgatcaaagtataaatctacaagcagaatggccacatcaatggcctgattatcttattgtatttgaaaatttatttgataataatcctatattggaagaatacattaaatcaaattatcaaattgatcgtagtatttggaatgcaccatttcattgggatgatcgtagaactggtaatttattaattctaaaaaaatattctataaacagttaattttatcattaaagatcccatcttgatttattgtcactatctttatcaatcgtaactttttcactttccttctctttctccttttccttgtccatctcgttgattattcttttcacttttgatacggtttcctctcgtacttctaataataatttattcataccttgcttttctgcacgatttattatatccattgattttttccagttttcttctttaactgaaacatcaaataatccaatgacacattcattaacacctaattctgcacctaatgcaaaccattctcttgccttaaataaatctttgaaaacatttaattcaatataacctaaattagcaaaagattctctaaatccttcacttgcagccatttgaaaatgataccttgatttcattggatcaccttcatttaataatccaaggaaaaaatgtgcttgtggattatcagttgcaggagctaatttaattgcattttcaaaattttccttagatttagttaattcatttgtacgaaaataaatcatacctaaactacgataagctgctgctgcaactgttgattttgagtcaagtttaagaaaatgttggtataatgaaacagctcttgataattgttttggtgatgatgttatattagagaaattaacatctgaagttggagttaattctgcctctgatgataattcaaattcaatttctttttctttctcttctatcagtttttcattgttatctaaagaatctgtataaccctttaattctctatcagcagcaagtttaaatgctaaaggatgttctaatttcattaattctttaatatattttttagcagttgatttgtcattttctgtccaaccatcaccattattatccaatgccataaatgataaagtacaaagagcatctctggaaccgtgttgagctgcttgttcaattaatttattttcaagttttaaaagatgtggattaattgtatgagtttgtttccttatttgtgcaagtactctctgatatataagtaaatcattacccataaatttatttgtaatttctatttttggttgatcattatcattaatattatcattatcattatcataaattgattcaataactggtaggtatttgttaaaattataacgtgcatcaaaatcaaataataatttagatataacttttttagatggtaatatatctaacaatagaggtttggtaagtgtatttgttgaataaaatctggtagagtgtgttatactcttccaatatatcatgattgtaaagtgatgataaaagcaaaaagttgttgaaaatcatgcatgcacatgaaaaatctcaaatatacgactttgcatgtacttttccaatcttgattgatcattatccactgaacaatgagtgaaactactatcaatacggatgttcattcaatggaattgaccattcaatcattacttgaaggtccattagagttattaaattcacatctgaaaaatttatatgattcacaagtaatattacgttcaatattagataaaatggagaatacgttagttaaaacaggtaataatctacgacctggtacattccacattgaaggtgaagatgaagatgaggtgatacggaatgaacgtgttgatttagatgattatttgaagagacttgtcagaatacgagataaacttaaaaagattgaagatattattgaagttgttgaaaaacgagttaatagaatggaatcaatgatgattggtgatgatgatgaagaggaggagggggatgaggatgatgaagtgtaattttagagtatgtatatatatagagttataaacaagattataaaccaactaatgatctaagtaattggaatggataacttggagattttaatttatagactgcaataatataactataagcaataaacattatagttgaagcaataattgagaagataagtttattacgaggatttttcaattgaggtaaaacttgtataacaatgaataaaccagcaaataaagttgtataaataattgacataatttgagtttcagtaccaaattgaacattatgaccttgagcaaaataatgaataactccatctttatcaactttatacatttctgcatttctaatttgattatacatataacctgaaattagtaaaataattgaaccaattgataggaattcccaaactttctttgattgaacaattgagaaaatttgtgattgaaatttatataatacaatgattgatgataataggattatgataagtgtcaataaaattgattttgaaggtggttgaacatttttcaagaatttaatatctaaaccaggtacattacctgagatccatctaatgaaaccatcagtattttccactgctaagaaagagaattcatttgtaaattgagataattgaggacctttaccaggagcataataaaataatcttggaactgcagttaattgtaaaagaccaaagaattctttagcagataaataatcggagataccgaaaataattttagatttatcatctttactatcaattggattaatcattaaactttcctcatcaaataaattattataataactttgagccattgccttataggaaggagtaaattgaacacatagagtacaaccaacacgaggatcatcagcagttaataaaacaaccaaaccataatcattatttttcattaattttttataatttttatcagttatatgaagaagaccatctttaccaacttcagagagagcttcctcatatgagatagcaaatactgtgtgaagagagagtaagaggtacgatatgatactaaataagttcataattgtagttgtctaatagaaaacattaaaagaaataacccatcatgatatatataatcaatgataattcaacgtgtcatgtaatgaaaatagagaaaatataccacttgttgaagaattcgaacacaataccaataatttcccatattttctcattttctcattttctcattttcctttaattttctcactgtaaaattgcccttttttccattttccatacttttaacttcttttaactacttttcactacttttttattaacatttcatcatttattatcacccaatatgccaataagaacactagattgtcatcctatcactcaatctatatccgatttaaaggataccgtcattggtattgacgttcttcattatattaattcaattttatcaaatgaacaaaattatcaaaattggctcattacatttggtgatgaattaccgattttcattaaaaatcgtataattaatgattcaaatgaatttattaaaaatggtatcaaaccaatatttgtatttccaggtttaaaatcagtctctcaattcatttattctgaacaaccagaatttactccttatgaaaaatatttacaatcaatttggggaaataataataataataataataacaataataccttcacaaatataacatcattcaatgatttatcacttattagatctctaaccgatgatttaacaattctattccgtgataataatttagatttcattataagtcctttcttacaatacaatcaattatattatatgttaaaatcaaatataatcaattgtatttattcatcgaatgaaatgttattatttgaagatttagataatttcattattgatttggattttacaactaaaagtttccgatatctatcaattaatcaaattttaaatgatttccaaattagtttcaatcaatttaaaaatatttcaatgtcaattggtaatataattcaacctttaatgttagtagaaaataattataatttccgaaacttaataaaatcagatatttattcaatgttatcaaatcaatcaaataaaattgatttacttattaatggaattgcaactttgaattattgtcccgttttaaaaatcgatggtagagttgaattaattaatgttaaaaattcaacaactttattatttgataaaaaagatgataataaatttgatattactaaaggtgatgttaaatcaatttatgaaactttaaataatgatcaaataccagaaaatttaaataatttattttgttcaagattaccggaagaaatttacttttatcaatcaattggtttgaatattttcaaaatttttgaatcaattttacataaaaattatattgaaagattaccattagatatgttatatgattcaatttatggaaaaattgtaactggtcatcaatcaatgaaaattaaagaattatcattatatttaattagtttaaaattaaatagattttatcaaaatcaaaaaatatccttgaaaagttattatcaaaataaatctctaccaactactaaatcgttagattttaaactttcattaccaaaagatttaacaactttatttgttagacattcaactgctaaatcatttgatttaacaacaattattaaaaatttaaataattcattccttaatgaatgttcttatccttcaaaggaagtattcaatttaaaaatttattcaaatcatgaaattttatcaacttcattactcagaactttatatgattataaatttattgaacttaataatagtgataataattcctttattttatcaaaatggggtcaatcacttttaaatttttcaattaaaaataatttagatattgaaataactttattaatatcaattttcttacaaagatttaatgatattaaaatcgatgaattatttaaatcttcatttgataaacaatttgataaaaaagaattatcattaattattaaatttacaactttctttaaacctttaattaatccaataaagaatgattttaaatttaatcaatcatcaatattatcaccatcacaagatttacttcattttagatcaattgttgaagttatgaagcatgaaataaaagatttaattacaattcatttgattaatattctattagaaaatagaagtgatttagataagtttagtcgtactaataaagattggacaattttatcatctgaattaccatttaaatcatcaatttcaagtacaatttatagtagttttattagagatgttttatcaagtgaaaataaagaggccatttttgaaaaatataataatgaagttttcaaaaattcaaagaaagtttacaatgaaataattaaattcttaaaaactgtttgtttattagctgaatcatttgatgaattacttaaacctgaattaattaatagtttcaaatccatgaatgttttattaaacagtttataaaaaaaattatataatataacttaactaacaattaatattgaaataatgaaatacatccctcaagtaaactttccatttcatttaattgattttgtaaaccatcaaaatcaagtgaatttctagcaagtgaaagaccaggtaattcaaaatgatcataatattcaccatcatataatccataaaggaaatttctattccaaggatcattataagtaccattaaattgaattaaaactttcattaataataataatttcgagttccaatcccatctattaacacttaataaatttggctcggtacctttaccattatcacaaatatcattccaagtaattgtaaatgcttcattttgttctgcaataaatgtaaacttattaattaaattttcaactttactaaaatctatattacttaaaccatttgatgaactttttatttcctctaaattaattttaaactctttaatcatttggaaaatatcgtatggtaaaattggtgtatctgataatttaacaattatatttgcaattaattttgtaataaatgaatgttttgacatatccggatcaattaaattttctttaaaattattaaatgtatcaagacatgaattttttgggtatttaggtacattccatttattataattgttatccttaaacttatcattatcattatttattagtttaaccgaaattcctggaacattatatctttgttgaaatggtaatgaatttgaaattggattaaaaatatatttatgattaattaaatcatcattttctatattattcattttaatttccggtaatgcagttaaatttgaattcttcatttcattaatactatttctaactaattgtttaaataatggatcaactgaaaattctaattcatcaccttgaattaaatcatctaaatcaatatatgcataaacatcacgttgggtgaattgattatttttaataacaaaatttgttgaacctgcaatattatattttgaaccagtaaatgatgcaaaataaattgaacgtaaaggtctccaaggtaatgataatgacatttcactgaaaatattcattaattccattaaaattgctgaacttgaactttccataccaccaaaacaaacagaatctcttgatgatccaattacaattgcaaatgtatcttgttctgaaccttcaagtttaccaataatattccaactctctttaaatggacgttcaataagatcaggattaattgacattttaaaatcaggggatcctaaccaaatttcaatttcttcatcatataatttaaaatcccaatcttgtactctttcaccaattccttgtaaatgtttcataattagtttaaaatctttccaagagataggtattgaaggtattgatggcataacatccgaatttctcaattttttatcaacatcaaaatgacgatctaaaattgaacctgaaataatacctggattaagtatattacctggatatttatttgtaaatgcaacaggttcacgttgaatagaatcaattgaataaattgactgtagttgaggatcagatataaataaaacaccagcagctccgtgtttttctgccatttgtatttgcctaaaagctggcaaatatggtgaatattttattataacaataggattttcatattgtttaataaaattataatcaagatcacttccataattaacataaactaggggaccggtagcttttaaattaggtgaaccaggattaaaagcatatttaaaattatttaaattatattgatcatcaacattttcaaataattgtaaatccaataataattcatcatttttgaaaagctgagcagttggtttatttggataatttgtaaaagcttcaaatataacatcaggatttaattccaatttactctttgatataaatttttcaatatattcacctaatgctaaatcacctgaagtgccacttaaatgaggcattgaagaaaaatattgtaaattttcctctaatcttttaggatctaatgacatttcaataaaattggataattttaaggggtctgtaaaatctgagtgtaaaccaaccatcccttctgatgataaacctgttaatgttgcaatatataatataattgcgaaaaagaatatatacatgaaccttttaattatcaatggattaccaactttagatatataatattcaaatttagcatttgaataacaatataattgatagattggatctaatgcattattaattggttgaattatacgtttattaaatgatttagctgcatttgatgcatgttgacgaaaagttaatggttcttggcttattggatcctctatatcaaactgtagttgtggagatggttcataagccggtggtaggtccaaaggcaggtcatttaaaggggtataagacatttgaataatgaaaacgaagaagaagaagtagtggtggcgttgtgtttatttattgtacgatgagttgaaaatgaagatgaatttgtaacgttaatgattttcatggaagtgtctttttaagagaatctcttatcgatatataggacagtatatgccatataatatagcattagtcagtgatttcttttatccacaacctggaggtgttgaacttcatatatatcatttagcacaggaattaattaaacgtaaacatagtgttgtaattataacacatggatatggagatagaagaggtgttagaatattaacaaatggattaaaagtttattatataccatatggagtatttcatagacaatcgacacatcctacagtgttttcagcattccccattttaaggaatatatttataagggaacaaattgagattgttcatggacatggtagttgttcatcaatgtgtcatgaaggattaattcatggtaatacaatgggattaaagactattttcactgatcattcattatttggatttgcagatgttgcatcaattatacataataaattattaaaatttacactgaaagatattggacatgttatatgtgtttcacatacatgtaaagaaaatacagttattagagcatcaattaaacctgaaaatgttagtgttataccaaatgctgttattcatgaaaatttccaaccattaaagaataaattatcattaaaggagataacaatagttgttatatcaagattattccctaataagggatgtgatttattaattgcaattatacctagaatttgtcaaaattataataatgttaaatttttaattgcaggagatggacctaaatttattgatttagaacaaatgattgaaatgtatcaattacaggaaagagttaaattaattggtagtattagacatgaacaagttagagatgtaatggttaagggacaaatttatttacatccatcattaactgaagcatttggaacagttttagttgaagctgcaagttgtggattattagttgttacaactaatgttggaggtatacctgaagttttaccaaataaaatgacagttttcgccaaacctgaagaggattcattagttgaagcagttaatgaagcaattaagaaattacaaaataaggaagttgatacaagtactttccataatgaaataattggtatgtatggatgggggaatgtagcattaagaactgagattgtttatgataaagtaatgaatcaaagaaagggtacaattggagatagattaattaaatattataatgttggtagttgggcaggtatattatatgttttatgtattgttgttgattatttaatattaggagtattggagatatattatcctagaggggacattgatttagccaggaaatggccagttaccaagagaaagaattaatgaatataggagtttatacaatagtaattgtccagtgatattagagatagataggtatatctttaggaatgctttatttctacaatgtgttaaaatgtacaaattagataacccttacagggttgtaatgttagaaatgagtctctatttcccttaaagatttaagagtaacaatatcaatctatatgaggaaatatcctatctttcattttcattattcagtattggtttaggataacttgattcatgagctttgaaatagtgtattgtataataaattaaatattttataaacgtatataaagtttattatacagtaaatatacatcagaaaaagaaaagattgtttgttttaaaatacattccttatatagtatatctcaatatggttctcaacactcattggtattagtgatagcaccatactgagttgtactatacaagaagtgtaccatactaaataacagttcaacaggaggataaaattataaaagtggaaaacgcactctatttatattatttttttgttattccatattaaccattgatgtttgtttattttattgtatttgtatatcattgtacaggttagtatatcattatattataagtatagacatatcatatatactatagtataatatcttcaatataatcaatataatatcttcaatataatcaatacaatgagtgaacgtagggaattattacaggaacaaaagcaagaaatacgagaagcatttacattatttgatttagataatgatggattattagataaacatgaattaagagctgcattaagggcattaggacttgattcatcacgtgaaactattcaacaacattttataaataatattgataataatatcaataataatactgtaagtagtagtagtagtagtacaaacaatacatctaatactgtatcatatgatacatttttcagaggagcagcatcattaacattatcaagagatccaaaggaggaagtacgaagagcatttcaattatttacaggaggtagagatacattaacagttggagatttacgtagagttgccaatgaattaggtgaaagtataacagagactgaacttattgccatgattgatgaattcgataatgatggagacggtgctctatcatgggatgaatttgcctctcttataatggaatagtatatagtataataacaaactcctccaatacacaatagaaataatttcttaatacgcggattatagtatcccgtttattaaatataggtggagaagaggttttatataattttgtattaaagagtctgtatattatttatttatttcttataggatctttaactttatttcctttctttcctgtttatcatcttaaagtaagcaatagacagagtcatgttccgtttaaacactttccgttcatttgcatcaactgctagaatttctcatgaattaactcgtgttgaaaatggtgttcaagtaatgaccgttagagatgctctgaatttagctcttcaagaagaattagatagagataatgatgtcttccttatgggtgaagaagttgctcaatataatggtgcttataaagtttcaagaggtttattagataaattcggtccaaagagaattattgatactccaattactgaaatgggttttactggtatatgtgtaggtgcagctttctctggtttaaaacctgtctgtgaatttatgacttttaattttgcaatgcaatcaattgatcaaattattaattctgctgctaaaacttattatatgtctggtggtaaaatgcctgttaatattactttccgtggtccaaatggtgcagctgcaggtgtcgctgctcaacattctcaagattatgctccttggtattctgcaattccaggtttaaaagttttatctccttattccgctgaagatgctaaaggtttattaaaggctgcaattagagatccaaatcctgttgttttcttagaaaatgaattattatatggtgaatcattccctgttaatgatgaaattttatctcctgattatgttttaccaattggtaaggctaaaattgaaattgaaggtgatgctgtatcagttttctctcattcaagaaatttaactttctgtatcgaagctgctaaaattattaaagaaaaatataatttaaatgttgaagtcgttaatttaagatcaattaaacctttagatttagatacaatctttaattcaattaaaaagactaatcatgcaataaccgttgaagctggtttccctcaatgtggtgttggttccgaaatttgtgctcaagttatggaatctgaagctttcgattatttagatgctccaattgaaagagttactggttgtgaagtcccaactccttatgctaaaactttagaagattttgccttccctgatactccaaccgttgttagaggtattgaaaaagttttatcattaggtgaatttgcttaatcaatttaatttaatttaatcaattaatctttatgtgtgtataaataagtatataatataaatataaataatattaaatataatactactttttataaaatctatttaaactaaatttaacatcctctgattggaaattttcaactttaaaataatcaggtgcaaatttaactaaccaatcaatacgtacactactaactgtacgtatataattcttgcttgttaaaacaaattcattataaataacccattcttcattacctgttaaaactgtacttggatgtaataaaacatcttgactatccttaattgtaatatatcctttacctgtactcttctttttagcaacttgcatgaaaaatccatttgccattgccttacgtatattatcataatattcattataattatcataattaccttcaattaattcaatatctaaactttccatcattcttcttaattgtttcctaacactttgtgcagattttaatgatctataattaaggaaattattaatacaccatttacgttgtccaattgaatatgattcttcactctcaaatgaatgataaacatttaataatgttaaatgatccccttcactatgtgaaaataattttttacattcatctgctgctctctttgctccttcaccatttggtctaatgaaaacatttggtactgataacattgaaacaattgttaaaatttcttcactacatttaaattttggactaccaattaataaaactgctaacattggatctaatgggaaaacacttgctaatctacctaatgatgttaatgaaccttcattatcaatacaatctaaataatttaattcctctaatgctctcatcattgtttcaggtgctggtggatccataaaatcaaaatgaactaaatcatcaatacctaatttcttcaattctaaaactgtattagataaattagatcttaaaacttctggatatgattgttcaattaattctttttcaaatgcttcctcagtatataatctaaaacatttacctggtctagttctaccagctctaccagctctttgttgtgctgaagcttttgaaattggactaactaataaactttcaactctaattcttggattataaactttttgtttagaaaaacctggatcaacaacataaactataccatcaattgtaagagaagtttctgcaatattagttgaaacaataactttacgtccgggtttaccacctttagttaatgcaggtggtgcaggttcaaaaattttttgctgttgatgtggtggtaatgaaccatataatggataaactttaattggtccacatccttcatctctaactaattgatcaccttcaagtgaaattttacgtactgcatcctcaatttcttcttcacctgttaaaaataataatatatcaccttcatcttcagttgcatgaatttgtaaaacagttctaattgcagcatctaaataatctctttgaaattcttttgtataataaatttcaactggataagttctaccaggtactgctaataatggtgcattatggaaataattttggaatttttctgcatctaatgtagcagacataataataatttttaaatcaggtcttctaacacttaattgttttaataaacccattaaaatatcagttgctaatgtacgttcatgagcttcatctaatataatacaagaatatttacttaattcatgatcttccatggcctctcttaataacataccatcagtcatatatttaagtatagttttattacttgtcatattttcaaatctaatattataaccaacttcttcacctaatttaacatccatttcatctgcaactctggcagcaactgacattgcagcgacacgtcgaggttgagtacatgcaacttgtttaccaaccaaatgtggcatatcatcatataaaacaaattgtggaacttgagttgtcttacctgaaccagtttcaccaactaaaaccataatttgagttttttggaaaatttcaagaaattctttacgttgttgatgaattggtaattctttacgaattttcaatatatcaaagtatttatcactaaattcattaccagtaaatggattattagtaccttcacctaatttattaccataatcagcagttgttaaatgtcttttattaatatcgaattcaccaccatcatgaaattctaatttattatcaatctttttatgaggatgtgccttcaattcagcttcaaatttttcagcttcttgttctgcaatagactcatgagtcttacttttcttcacaggtctttcactcattgtctaaagtaagtaatcgttgtaataatataattacaagtatatatttaaaagaagttttaaagtattttaatggaaaaaaaatttttaatctttagaattattaccacattgggaagacaccggcgtttcatcggtcgatgcgtctgtgttgattgcatgattatagcttaaataccttccatagtatcatatagaaggtgatatagtcatcaaatcagtgtatagtgtagctatacatataggtactgtctttacagtaataacttcactaaaaagaaaggaaatggtggaaagaaagcggtaaaaacctctcaaataaaagataaatgttgatgataaagtaaaaagtcttattttgccatcaagatgagcatttcctggtaatgttgtattttcttcccgatttactttacgtttttttctcttagcttagtttcttattcctttccttatctctctcttcaaggtaatctaaagtgcatcgtttactgttgaaaaaggttgataaaataaaaagctttattcagtttcaaattttttaaaaacacacacacaagtttccaatattataaataagttcttgatttattatttataatataatataacaaaggaattcatttccttgaagtaaatttcagcaaattaaattaaatatatcctggttaacaattaaaaaaataaatacacaataaaagtataagaatattgtataatagagctaatataataatataataaataaaatagatcataaattagaataaaatagaataatagaatagagaataatagagaataatacaaagaattgaataaaataatgtcttcaaatagtgaactaaatcctccaaatgataatggttcatctgcacctaaaaataaaaggaaatataactttcaaagagcttcagtcgcctgtgatcaatgtagaaaagccaaaactcggtgtaattatattgaaaatggttcaaattgttttaggtgtgaaaatttatcattaaaatgttccctaagtgaacattccagtgtacccgtcctttcaactttccaaaaatctgcaaatattgcaacaagggatgaagttttagaacaaaaatctcaaattcaacaaaagaaaaagaaaagaaaatctttaactgcaaataatagtatgttaggaattcaagataatacaccaatttcaacaattgattctgcttcaacaaataaatcagattataattttgatccatcctctaattcaatgtcaaattcaatttcaacttcaatttctccaactgataataatttagattcaaatgctttagcaattattaattctaaaattgataaattaacttcaattattagtatactggtagaaaaagatcttaataataatattaataacaataataataacaataataataacaataataataccgttaatagtggtgccttgatccccgctcaaaattcatttgttgatttcaattctgtgcccttatcaacaaatagggctaatagaaaaccttcaactacactagatttatcatttcaaaatcctaatcttagtatgcatccaaacctaaatcctaatatgaatatgaatatgaatatgaattttaatccaaatatgaatccaagtatgaatccaaatataaatccaaatataaatccaagtatgaattcaaatatgaatccaaatattccatctaatatgaacaataatatgaacaataatatgaacactactattaatccaaatatgaatatgagtatgcaaatgcatatgcacatgaataaattttatccacctaatacaatttcaaaattaccattagctatcagtaatgaaatgaaacctccatttgttttacaaccttcaattaatgctccattagctcgtccttatttgcaaacttcaaataagttatcaaatttgaatacattatcaaataattcaaatacaatctctactgtaagtaagaatccaaataatattcatgaaaatgacgaattttttttccttaatgcaccatatgtagatattattaatacatcaacacaattaggtttaccattttcaaaagaaattggttttgatataactaaagatatggtgttaatttcaattcaagaaagatatgatttgattaatagaaaattattagattatgatacatgttatagtttaattgaaatcgcagttttacattgtggtaaatggatttcattttatcaagaagattttaaaacatggtttgattcgattagaattagctcaccattattattttgtacattagttttatttggtttacgttatcaacgattatcaaatatgaatgaaaacttagaattagatattttacaaagtattcatcaattattatcattaagtatttatgaagtaccacaaaataaagaatttctacaaacatgtattttattaacacattattcaccctcattatcatatagacatatttattttgattcttggtggatttcatcttatggtttaattcatttcatgacacgtgaaatgtcaattaatttattagttaaaagtgttaaatcaaatgaaaaaattcatcaatatagaatttggaatcatttaacaatttctcatttgattaattgtattttatcgggtaggccatgtattgttgatgaaattagacttgatcaatgtcgtgatattttagatttacctgaagcaaattcatttgatgcaataattgttgctcaattgtgtatgatattatcattatataattcattattattccctgaaaatgttgaaaattcaatcaaagaattagatggtgtttattcagattggaaatatttaacaaatgaaatttcatcgggatttactgttaaagttttctattattttgctaaattaatgattctaagaagatatatgttaaaaaatttgtttttaaagggtcaaatagaatttaagaataaatgtaataattttttgaaatatatgaaagatttttacgaattaattaaatcaagagacgatttgtttgatggtagtgatttagttaatcaatgtatcattttatcaatttttatgttattacattttaaacagttaggattatttgatgatgataaaagttaaaaatgataaacttattataaaatgtgttgatacatttttaaacttatgttcatcgatggactccagaattcattgttttaacaattatttcattaactattatgaattaattaggagatttaaaaattcattatttaataataacaataacaatgacaataatgttaatgctaaaaataataaaactcaataactaaaccctagaaataatacaataaaataagtatcatacacacattgagtatactacttttgcatgcattttacaatatataagttttaaccattaatgatgttttcttttcgttctttactgttctttacaatcactcatcttttacttattacttcttttacacaatttctttttatgcaattttttttaataacagtttataattaatttattatgaaacatataaacctgcagggataggtgaattgaaaccgtaccattctggtagcagaaaaagcaaaattgtatagtagactgtaccataataaaaaatgttctgttttgaaagcatgaaaatttctcaaaaaggagaggaaggattacccgattaggcatgttttctgttctttatacgtcattctggcagaaaacttatctattctgctattatttgtacttgtatatttcattgaacattttctgtaatgtagtttgtactgtaatgttagaaattagtataaattgaagcaagaatgtcataatttttaaacaaactattttcaactatcattcactcctttctttctgttatttctattcgtttttatttactttaattttagttatttcatttattaaataaagacattcgctttaattcaatacaaatcaaatcaagtttaacaatgaagttcactcttattacactcactactattttaactgcatcagttgcatcagcaggttattcagaaaccgttgatactgattgtgatccattaaccaagacaacttcaactactgaagaaactacaccatatgttccaactccagttccatcaactgaaacaacaactgaaactgaaactgatgattgtgattcatcaactaaatcaacatatgttccaccaccaaaaacagaaccaattccaactccaccagctccatcaacttattattcaactgagacaacaactgaaactgatgattgtgattcatcaactaaaacatatccaactccaattcctgaaactactccagatgttccaatttatcataatacaactattacaacaagtacaaatcctgttgttccaccaattcaaccaactgttccataccaaaatgaaactacaccaattgttacaccagtttatccaactggtccatatcataatgtaactactcctgttgttccaggtactccagtttcatccagttatccaggtgctccaactactccagtttctccatttacaccagtttctccaacttatccaggtggtccatcattttcaacttatgaaggtgcagctattaaagttaatggtgctaatgcagttgcaggtgcagcacttgcagctggttactttttattataagaatgtatatgcaacacattcttgataaaaagattttttttttaattttctttagtaataatcaaacaattaatgtataactttaataataatcaattaatcaattaaaaaaaacataataatgtaaattgtaatttatatgtgcatttattaattttattacatgtattatataaattttaattttaattttaagttataaagaaatattataaatttaaatcaaataatctattcaacatcatcaaaagtttcaccttcaactaattctgggatatcttcatcctttgcaccatttgaagcttgattttgtaattgagctaaactttcaggattttgttgaaattgttgagcaagtttttgtaataattctaaattttctgaacctaattgagttaaaatacctggtaataattcagtaatttgcttttcttgtgcaaaacctgtaactgcataagtattatttgcagcacaagcttgaacaccaactctattgaaatgtaaaactgtaccatcatctctaaagaaatttgcttctgcaacatcagttaaagttgttggattgaatttttgtaatgcagcttgaattttagtatcatcaccttctgatgacttattaactttctttgccttaactctttgaccaccaactttcttagctgatgattgctttaatttagctaacttttctggatcaataggcatatttacaatagactgtttagttgattaagaaagaattcaaaagaagttacaggattaacaagaatatgtcactaatgaaattcaccaaaacgtcgaaaaaagtgaaatttgtcaaataaatcgaggtgttgaagatgaaaaaataatgaagttatttatttaagttactgtgagggggtacggatgttggttatatactgtattatacaatgccatttaatcaattaattcatctcttgaagagtatcacctctagcttccagttctttcagtaatctctccctatttcttttacatgttaatgtattaacatgtcttttcaatgcatctctacgtgcaaaacctttatgacataatggacaaatatttggtggtactttgagatgaattttttcatgtcttttcaaatctgatgatctcttaaatgttatgccacaattaccacatttaaagtttctaacttcatcatcattatgtgattttcgctttgttattagtagtattattagtattattattagtattggttattgaattatttcgtttatctctagtgccagacttttgataatttttattaactttaggatgtaattgttattggtggttgttgaatattattaggaatattatcaatttcatttctataattttgattttctccatcttcttccatatctgaatcatcaaattctataccctcatcatcttcatcatccccttcttcatcatcttcatcttcatcatcttcatcatctgagtaatatccttcagttttatcatgatcattatcttcattatgcacatcatcgtgatcataattttgtctttgtctttgttgtaataataaattagatgataaattttgtacagataattgattttgattattgacaaaatcatttgcagttttaaaaatatctaatgaaaattgtgggaaatctaaattagttggtgtatgtctaagaggattttcagtaaatggaggtataattgaattagttggagaattttgaataaagttatttgggtataaatcatctgttgataataatgacatttttgattgtaaatcttgattattattattactatattatcattaggcattactaatattattatttgaaattgtattaatattatcattagtagatgaaaatgaatcgattggactttcgccaattgatttcatatattccattgaaattggtaatccaccatgtggagaatttgaatattgtaatctatttaaaatatctctaattgttggatcaactttactttcatttaatttaataacttcatttgcagcttttaaaaatgctaaatcttcatcagttatatttgatgaattatttaattgatttgttaatgatatgttattatttaattcaggtttttgagaatttaatatcctaaataattccttttgttttgatgatgttgaattattattatatcgtatattatcatcattattattattattgtggttgtcattattattattattattatccttatcgttattataagttgttattattattaaactctatattaccaaacgacatgtcccctattgtatcgtatcgtatcctatcctatcctatcctatatcctatcttattaaatatactgtgttatatgataatcaataataatgaattaaaacaaacaacacacaatggatcaaacatgtgaatattcaatgaatgtgtatatcaggtacttcaataaggtatttaagaattatatagaaatagaaagttgagatagaagtcatgaaccacagttttgcagttactgttgttgatggctcaaactgacaaaaaaaaatttaattttccagttattaaagagtttaatacaatctcactgttgccgtattgtttaattattgtcactttggtattataatagataatagataattaccggttttgctattgtaatgtgatatactctattaatacagcaatgtttatttagtgtttattctaataaaaaatattgcgttgtgccacgtgactgtggtggagccacacttttatcttattattattacgtaatatttactatactatacttaactataaacaatataactattaaatactcttttctaacatactttctctagctggacctgtaccaacccattgaattggtacctctaaataatcttcaataaatttaagataaatcttagcattttcaggtaattcttcatatgttttaatttgtgtaatatcttcttcccaaccttggaatgttttataaacaacttcaactttacctaaaacatttaaacattcagggaatgattttaaaatttcaccattatatttataatcaactgcaactttaatttccttaaaagtatctaaaacatctaattttgtaatatttaatgatgtataaccattaatccatgtagaatattttaaaacaactaaatctaaccaaccacatcttctctttctacccgtcgtaacaccaacttcaaatccaatatcttgtaatttttcaccaatttcatttaattgttctgttgggaatggaccttcaccaactcttgttgtatatgctttaacaacaccataaatatttttaattgattttggtggaatacctaaacctgttaaaacacctccaatacctgtatttgatgatgtaacatatggataagtaccaaaatctaaatctaacattaaagcatttgcaccttcaactaaaatttttttattctcctttaatgctttatgcataaattcaactgaatcaacaacaaatggtgaaattttttcctttaaaattttatatctatttaattcatcttcaacattatattcaaattcaccatatcttttttgtcttgttgcaaataatcttcttaatttagtttcaaattcttcccaagctccaggttcattactaactaaatgatgaactctaatacctgatcttgaagcttttgttgaataagttggtccaatacctttacctgttgtaccaattgattttttattacctgataattcagcttctcttaatttatcaactctttgatggaaatcaaaaactaagtgagctcttgatgaaaggaataatctatcactacattttaaaccttgattttcaattttttctaattcatcaaaaaatgaaggtatatgaacaacgacacctgaaccaactaaattaagacaatttggattaactaaacctgatggtaacatatggaaatcatattttgttttaccaacaacaattgtatgacctgcattattaccaccttgacatctagcacaaacttcaatattatcacaaagtaaatcaactaatttacccttaccttcatcaccccattgagaacctaaaacaacatctgccattatgagtatttattatttattatttattatatctattaatataattatgaacgcgttagttgcacgttaaaccaaataaagagatgaacaaaaaaaagaggtatatcttattgaaaggatatcacaatatgggaaatcaattgattttatactatacgtgattaatcataatagataataaattactattatatacgcggatctgagtgggtcaagtcagtgatgtttaattaactaattttactattatcagtgatatacattgtgtctgctgtgttacaatattaggagtaaatgactatatagtacatagccttattgtcatcggatcactgtgtagtttattttgtagtatttactctattgtaaagagagaatgatgttaatattaatatttcctatagtcttatatcttaatgttaattctatgaaaattgaaatttgacttcttccattaggtaatcatcttatactaaatgccttaaacgataataagataacagattatacaaggtatagatgagtctagatacagtatttgattattaaatttgttgattatgattataaaactatgttataaaaagagaaagaaaagaactaaaagtaaaaaaagttatatttatggagtaaaactaagtatttgttttattaaacagtaaacttaatttcctttactgaaacagaatttaccaatatagtatggacctttaactaaaacattataacaaacaacaccttgctgttttaaatctttaccagatggaataattgaaccaatattttctctgattcccttagctgtgaaatcatatctccattgttcaccgtatgacataggttcgtgtgcgttatccattattatttaaattggtttgtgtttgttaaaggtagacaaaaaagtatgagaataaaagaaatgatatagattatactgagaagttgaagagatataagcagataacggttataaacatcatgaatatttaaagagcagatgatataatatttaaatagttaaatagttacatactaatacaatactacacacgttgtgatagatgagttattagaagacatacatagagagataagccttatttgatatacacgtggtagttaataataaaagtaataataataatctgttgatgacatatagtttaataaattaatggtgatgagccccttatttaatttactctttttagataactaaggggactaattttcaagactggtataatgattctaagaaaaatactactaaaaaatagaaattaaaaaataatcggggtcaactgggaattgaacccagggcctcctgcacccaaagcaggaatcataccactagaccattaacccgcggttgttgggttcttctatgatattatcactgtaattattgcatatgtttacgtaagcaaaaattatacaaaactattttttaaagttgtagtaaatattcattttattctctttgcaaggttcaatatttttgatgttttgaagagtgaagtttggactcacatatttaacatactatttctagaaaacagaataaaaaataacatttttgaaaaaaaagactaggaaagtatattttctctaataaacattcaagaagttgttgttaaacataggtttaagtggtacaaaaggagagttcgaggtactacaggatatactaacgaatactaaactacatttttataaaacactaataataaatttaaattgtaatcagtaaaattgatgaatgttggaaacaggttgtttatcttcattacagatcagagtgagctgagtaaaaattttcatcattaacaatttaagttatttattagtgttttgatattgtaaaattaactacatttgatgctttgaacatctcccgatggtatcaatacatctatgcatgtatccatccttattaccaatacacatacttaaatgtgattgggcagctctactttcaagaatcaaagcaaaaagactgaaagaaagaacaaggatagtattaaagtggaaaagtaatttctcactattcaatttataacggaaaaaataatctacatgtttttctaaagagagggttttttctgatgattgttaaactcttaggaactttcaacatttaatggatagatctctcaagaaagactatgactggctattatcacgtaattcaaatgcttatgaaatactagggataaaatcaacatctaatttgagtgaattgcgtaaagcattcagggaaaaagcattattatatcatcctgataagaatgatagttcaattgatattgatgaaaaatttagagaagttagtattagttataaaattcttaatgatccttcattacgtgaagaatatgatacatacataactgggaaactcaaatcaactttaaaatcaccatcagttaattcaagatgtatctaaatttaaatctgatttgaaaaagaaggaagatttgtataagtctgacaaaattacaaaactaacaagggatcaaaaaatatcacaattatctcaatggtttgatgattatatcaaaaaaaaggtaattgttgaacaaaagcctataagaaaggaatcatcatatgatataacgaaaaaatcatcaatattcccgaaaattgtacaagttaaatggaaaaataaaatagatattaatgattttgaagacataattgagcaactaatgtcagtttttggtcctgttaagtatgttaatgcatttgatgaaaataaggattcagatcattatcattatgcttatgttgcatttaaatcaccaattggtgcagcattagcttcaaatgttgattattcaattactaatgatatttgggattctcttaatttgaggaaaagttcaagtcttttaagagaagtttcattggttgattatgatgaagctttaaaatctgttggaaatttggaaagtttaggttctttagattacatagcatttaaaataaaaggcatataatttatgtttcccatgttgaactcttttagcttttatacacacatattatagaaccatatatatagaaacattaatcaatcagaatcgattattatagcatctggcgatctaactttattctttacaggggtatgtgctttacttttatctttcctcttcttcgtacttctaagattttgtccttgtccttggaaaactattttcttcttaccttcgtcttcctccttttgctttctttcagcctcctcaaattcatctacatatggaaccacggggaacccaaaaaataaatatccttcaggtaattgtaatggttttggtggacccgatagatcaatttcttcactctttacctcttcaacaggtttaatctcttcttgtattttcttaccagataatttagcaccacttccactaaatttattaatagcttcatttgtaacattagataacatactactatagttgatttgccttgccatcgtacctttacccttcaatgatggtgcatttaatgcctcttctattttccttttagcattttcttcctttaatttctcatagtctggctcgacatatcctaccggtgttgcaaaatcagttactaaatcagtttcaataacacaaataccatgagttgaagattccggtttgatctctaaaatcttaattttataaatatgattattataattcaactcaattatatcattgactgttaatgtagtaaaatttcttaatgcattttctaaaactgccttgggatcagaaatttcaagaaaatcagtagattgtggttcaagtttgacaaaattaccttgtggtaaatcagttgtttcaattctaataactgcaccagcactgatttctaaagtgttcatcatccattccggtaaataacatctaccctcatctgcagtgaattccaaaacaccactatgagtatatttgcctgtgttcgtacttgataatttgaaaagcatagggtatctgatattcagcattgtaagtttatgtaatgcagattgtggtaaaaagattttacctccataattagagatactcttattactcgcatctttcatcattgttattgggtaacatctgaaatgttcttcaaatgtttgtggaatttgaaccatttgtgggaaaaatgatgacggattatgtcccgaaaattcaggaaagccagaaaactgtttgcaaagaaatttaaatgttagtaattgttcaaaatgctgagtaatccaatttccatacttaccatattcaattgtattatatcaatcttcttttgttgaacttaatctaataaaatgtacagaaaagataaagaatttgccgttggatcgacaatgtgctaggaatctttgaaattttcatgtctacaatttgcagcgataaagaactcgaactcacgacagcgtttttttgttactaagtcttgtttactggagttacaccttctacgttttgcttagcttttagtgaatctattgtatagacaggcctgttttgaggtgaaagcatttgtaacttctcaggtaaactaattgaaatgacagaacctacagatagggagacaaatcaaatggatcttgatttagatcatttttcaaaagatgaattgcgtcaattacttgctaatgatgaatataacgaagaagcattagaattctcagatgatgcagatgaaattgtcaataatgataatgaattagatgattcagattttgttgatgatgttagagaagataatgattccgatatttctgattatgaagattctgctaatagtaaagcagatagatataaaacattagcagatttaggatttgatgaatcagaagttgaagatgaaaatattagtgataacgattccgatgatgaatttttattcaggaatgcccttagggaagctaggaattttaaagtgaaaaccacaaagaaaccacgtaaaaagggtggtttggctgcattgagaagaaaaattagacgtactgaactggatcctgaaatcaaaatagcattatctaaggcaaatgaagcctttgttactaatgatttagataatgcattgaaattatattcagaggttattaaattggataaaaataatttcagtgcttataaaacattaggtgaaatatatagaatgaaaaatgaattgaataaatgttctaatatttggcttttagctgctcatttgaatcctaatgatggtgaattctggaaatcaattgccgaattatcagttgaattaggacatttgaaacaagctttgtattgttacagacgtgcaatccatgcatctcgtggtaaagattacgatgccatttttgcaagagcttgtctttatagagaggttggtaaatttaaaagagcatcctctgatttattaaaactcagatcagtattacctcatgatgctagaattgtacgtgaattagccaaagtttatgttgaagaaaatagagttaatgatgcgatatcactatattcaaaaatcttagaagacaatatgacatttagaacactagttgataagggagaaatggttactttgaataacatcacttttgattggtctgaacttaacattttatcagaattatatgcatcaaaagctgcttggagtttaggtataaaatcattaagacaaacatcaagatggattcaagaaagagaaaagcaagtgttttgggatgaaaatccgaatattgatgtagaatttgatgaaagaagatttgatcatccaaagttccaaaaaataatacctaaggaaggatcattagattattccttaccaatcgatattcgtgttcaattaggtattttcagacttaacaataagaatgaagaagaagcaataaaacatttttccattttggcagaacaaccaattgaggaagctcctgatttatattttaaagttggtatggaattagagagttttgcattattcaaagaagctctagactttttaataccattatcctattatgaggaatataatacttcagaattagttattacaattgccaaatgtttaagagagacagaagattttgagagtgctaaagaaacttacgttagacttcttgaatttgataaagataatgtcgaattgaaagttgcacttgctgaatgttatttttatttgaatgatattgaagcagctgataaactttataatgaagccaagaaggagagaaagaaggaaaaagctaaagtacaggataaaccgagcttaactgaaatggaaagtgaaatacaaaagaaacttgaagaagtaggcatcagagatgaagaagatgacgaagaagaagacaatgatattgaacgtacacaagcaattattgaagatggtccaagtaaaaagaagaagaagaaaaacgtttcatataatgaagatgaattgaatacaatgtccatgaaatctgatattagagttggtaagctcttcaatagatgtatgaagattttatcgcaaattgatattttacaaggcaaagatttgttagataaaaaggaaaagagttctttgaaaactcttgtcagtgtttggattgaaacagcttctgatttaattgaaatttttgcaatgtatagatggtttttctcttctgataaagctaaaaagtttcatatcaagttacgtttgagaaccgctaagcttggtattgatcaaaaaatcttaagaatgaaatatctacaaaatgaaatcatcctttcctaaaaagtgtttcagtgaagcatgtcctgaagatgaatttaaaggattgaaatattctgattggtatgtcctttttgtacgatatgccctcttgattgcagaatttgagagagatggtgagagtgcatttatgattcaagatatcatcaaacaagtcaatgttttaaagagaatgagttaactacacaattagtaggtttatcaattggtgtcatgacaaaagatgcatctgttatcatgacgcaaacaagaaatattatgaatgattatcaattttcaattgactcattcagattgtaccttgctagtatagttccaactgttcaaatggaaggtttatatgcagatccaccatcacaaaaattcatgttgcgtcaagttaaagcttttgattcattgaaagacgaatctaaagaaaacatcacaggaaaagctacaatcaccaaaacaaatgttgatacaacaaaggatcattttcttgtcaattatgtctatgcatcatatcttttcaccaacaagtcatattattcaactttaatttatttgttaaagttgtataagacatacccaaacaatccagacttactctttttactcgcattggccaatttacacagatcaattcaaagaaaaacatttaataccaattttcaaattttacaaggtttgacataccttttcgaatatatccaaactaaagaccaaaatgatccatacaacaaaatggaagcattttacaatattggacgtagtttctcattaatcggtttagatcatttagcaattggattttatgaaaatgttttggaaattgaagttgatgatccaacctatgatctcaagaaagaagctgcgtacaatttgtacatgatttacaatatcaataaaaattttaaacaagctgaacttatcatgaacaaatatttagttatttagatttataataggatagttccttctatgtattactgtatattattattgttttattagtgtttactaaagacgtcgaaacatgtacaagaagctcccagggggtagtaaagtataaggggcagcgacctgaagatcaaaatttgaaatttgactgacagcaatgttaatggaatctttaaggaatgtgtacttttttctttggaaaatccacccaacatccaagttgaatgataatgtcagtagctcaagagatacacgggaaaaaattggaacagattcaatttcaaattgatgaaatagaccaaaaactagagtcttatcttgagaattacaatgttaaacaattacaacatgatttagatctatcaaacacaaatcatgaaaaaggaactcttagtagtaagaaaaccaatggttttggggaattaaatagaaatgatcaatctgaggtgattgaagtgtgcaatcagttatcaataatcaatgaattgatcaccgaatttcagcaacaaaatcaatttgaatacaaatcatcagttttcataaagttacgttccaaaattaacaatttacataaaagtatctcttcaacatgcgatgctgacaatattaagatattaaaggagttgaagaataaacttcattctttcaaaaatgatgtaaccaatatgtcaaaagaaaaaattcatgagtatttgtatataaatgaagaattggaaatttcatttaataaggtcaactcagatggattaccatacgagaagtttttatcatctagtaaagaccttttggatacctcattaaatgaagtttttgagttgaataaaatgtttaacgattggattataaaagtttttgataaacttgataaagggtacaaagtggtaattgaaaatgatcaaggctctttcaaactttccttcttggagcaagaagtggagattatacattttgctaactcaattgaaaagattatactatttttcaatgaaatagcattgttttctcaaaatataaaagattttggaaactatagatctcttacaggtaaaaacatactaactaaattgaaaagtaaaatatttcaaaaagaaaatgtttatcccttaattatagacaaaattaactacgatgagtatggaaatgggaaagatagtaaagtttcagttattgctagattatacgagatatccagacttttatcagagaaatactggtctaaggatgggttttgtgaactggaattttggattgatgatttaactaattcatgggttaataatttagttgaagtgaatattgacaatataaaagaatatgtgatgaatttgttagatgatcaatataatgatttattaaaaaatgaaaatctaatcaccaaagcattagaatttgatgatgatgttgcggcagtacagacaaaacaaccggaacaattaactcaaaacgaggattggaataatgaagattggaatgaaaattggggtagtgatggtgaaaacaaggttgagactaaagttcaggtcaagaaagagaacactgatacaaaatcagatgagtggaatgacgaagatgatggatggaatgatgatgcttggggctcagatgaggaagtagatgcacaaatacaagcgccaccagtacaaaaggaagaagatgaggatgggtgggatgcatggggtggtgaagacgatttaaagtcattgaaaagtaacgcttcaatcaagcagaattttgttaaaactgataaaaagaatcaatataatgctcctgtttataaatattctaaattggtgatggaagctatgaaaatatttgacacatatatgaaaaactatgatgatttgaagaacttgcatgtaggtaatgaacaaattatggagacacataatttatttaaacatgggtttaaaaagttatgtatctcatactatatgatgctttcatcaaagattaaatcaacttacaaaaacaaaattcttttttacaatgattacaataaaattttagaagaatgttatactaaatacacaattgatttaacatcttgcttcaaaatgaattcttcatttattgaaaaatttacaaattcatacactactttgatactaaacgtaattgatgattatagggaaactatttgggaagataatgatttagataatgatgataatttgaatacttataaaatggaatttttaataagatatgattctcaattcaatgaaattaaagcggagttgaataattcatttgaaatgaatactcaaatgatattagatacttttgtcacagttgtttttaattcatttaatactatatgtgatttgattttatcaagaaaagatatatcatcatatgaatctgaggttttatctgatatcatagatgatataaccaatccagctgctcaacaaataactattggttattcaaatataaaccttgaaaacatccaaacatttaataaactaagacaagtgagattagttttatctaataatttgaaatctattttagatattttctatgatgcaagactacatgaaattgaaactgatgaattgatttcacttattaaaagtttattcgtggagagtccacaaagagagaacacaattgctgaaattcgtactgcaagagaaactcaattctaaaaactaccgtattatgggaatatcgtttttcattagtttataaagttattttaaaatttttatctctaattttatacaaaaagtttatagttcatcatgtaatgattgtaataattttttattagccactgggaatataaccacatactcaatgtataagttaccatattcatcattcccattcaatattggcatacctttacctttaataacttcaatttcaccgtcactaacactttgaaatttatttcttttaattgtaattgttggattatattcatcgaaaaatctaatttttctttcccaatcaccaaataatgcttcttttaaacttaaaacttcagttctatataaattattaccacttcttctataaccaagatttgaatttggactttcctttaaaataatatttaaatcacctgcaataattccaggttgagttggacctttaccatgaaatttttcaatatgatttcttggagtacctggattaacatgtaaattaaaattctttatttgatcataagcaccttcacctctacaagttttacatttatttttaattacttgtccactaccttgacattttggacatgttgtttcaattttttgtatcataccattacccatattaaatctttgtattactctacctctaccaccacaactatcacatggatgttttaaaccatcactagatccagtacctttacatttatcacaattatcacgtaatgaaatattaaagtcaatatctttaccattaaagaaatctgctaaatcaacttgaatttctgaagaaacatcttgagctcttggtggtccttgattaaatccaaaaaaactactaaatggatcaccaccaccatgacgaaatccaccaccaccaccacgaccttgtccaccaccattacctgcaccacctttaataccatcttctccatatctatcataaacacttcttttctctgaatccattaaaacatcataggcattagttatatccatatatttattttgagcttcttcatcaccaggatttttatcaggatggaattttttacttaattctctatatgcacgtttaatttccttttcatcggcatttctatcaacacctaaaattttataataatcagattctgataaaacaactgataaaaaagttgaaaataagaaaaagagtgcaattgctgatctcatttatcttgtagttgtttgtttgttattttatttgattgaataaagaaatttgataaagaaaaggtgtaaatagtagatattaagaaattccgtgttaaaaaacacgtagcagttttgattgaaattttaattttcatgttgatgattaaaaaatttagtttaacagttgtattttatacaatataaggttaattaccatgaatataagtatatactaggatttgggtatattataaaattttattaagtaaactttacatcaatgataaatcagatctttcaccatttttccaaaatttgaaaaatcctaaatttgatgatctatttacatcatttacaattgcaacaccatcaacatttacatttgatctaaaatctacaatttcatttcttacaacatttgaaataattgcatcatcttcaattaattcagaaacaattctattacttaatttattcatcattgtatttcttggagttggtttacctgtaattcttgatgtacgaattttagttttatgagatgatttatctaaaactgtatgatgagcaaatgctgaagaatctgaaatataacctgtactaaataaatttataattgaacggaaaattctttgaattgtccttgttcttgaatatcttggttgtggtaaagatctcattatttaattatttatttagtaaagtgttagcaatggattattttgattggaaatataaatctaagaattaaactaaagtaagatagaagtagaagagaagtgtaagaaagttgtaaaagcattaaaaaagagttaaaagaagtaaaaatatttgaaaacccataaaactattgaaatatttgaaaaaggggatatataaaaattgttgtgatatttataaaatgtctattaataatattataataataacaagaatattgtaattataattcaaacttcaaccaatcccaatcagcagctaaagtttcacccatatgagaatctgaattaatcattggttcacctaattcaattatattctcttctttaatcattgtattataagctctctttttaccaaaacttgaacttaaattaacattacttggtaatgaatttgacatatgattattaagtaatgttgtcattgaatcttgatcaaaattatttaatgtatttaatgtattaagatttgatgaaaagaggattttagtattagtatcaagtacacttgaatcatcaactaaatttatcttattgttggtattattattattattattgttggtgttattattgttatttgttatagtacttggggtatcaggattgtttaagttggtatgatttggagtaaatgataatgaagataatgaagttgagattgaaagtgatggattatactttaaattattttttattgaatgtccattggtattgttattattattattattattattattattactgctattattattattattattattattatttgtaactggaggtcttataactccatgtaatttaaagaataatccacaagcattacataataatctattttcacttgttttacgccaaagtggagttgttgttgtaaaacaattttcacaaattggttgattaacattattatttgaatgatttaatggagtatttgaatttgaattatttttagatgatggattattaatattattaatattattagtaattagaattgattgatttctagcttgattcattgcttgattcattgaatttgatattgaattttgaattgaatcattaaatgaagaagattgtaataaagttggagatgttgaaacagttacaggagttggataattttgattttgatttttatctaaagaaatttctaatgtattaatgtaatttgataaattataatctgaattattatgactatgacttaaagttttattttttttaattggagattcaaatgataatttatttaatgatgattcctctaaattaaggtaactatcaatattaaaatcatcattcataataagattttgcatttcatcaattttatcgaaattaacaggtaattttttcaaagatgagattgaaggtattgatttattattatttaaatttgaaggtaaagaagatgatataagatttgaagcaggggtattataatttgaattaattgaattaaatgaatttaaattttcatcactaaagatattaatattgaaatttctaccaggagatattgaattatttaataaatgattagtgttattattattattattattattagtagaagttgaataagaatctggatttgatataccatattcttcttttgaaattcttctaatatgttcaatataatcgaattcagttgttgaagatgaagaatttttatttgatttaattgaattttgtctttctttttgattatgagaatctttcttaattttagattgtttctttgagaatgattcttgtctagatttttgttttattaaaggaggttttgttgtaatgttattgataataatatattattattattagtattattatttaattttttaactctattaatactattaagtctccaagataaatttaatatacgttgattctttggtaataaattattattattactaaacattttaaagatttctaatgaatcatttgagatatttgaacattcagcattaatttcatctttaatcattttaacgggtttaatttcagtatttaataaactaatagtattaatattatgattagatggagtgttattattattattattattattcatattattattagttaaagataggaagtcattatttttcatatctaataagttatttgaataatctaattgagaggagaaagaagatggtggagataattgttccatttgttaataagttgattattatagtgtattgtatttgatatttattgattgattgatataagataaataaaagaagaaacgtatagtactaaagtgaataaaaggggatatactaatgtagtatgtaactgttaaacaaggatccttagatcaagcaataagtaataataacagtaacagtaataataataatatataataacgttaatattaattaataaagttaatattaatacaatcaattaatagggaataatcttatctgaccaattagattaagtttagataatgaattataatagtaaaatatctttttccttattgtcttattgtcttattgtcttttttttctttttcttattgttattattagtatgactgataaattttgaggtaattaatttatttatttatagtttttatttatagtatgggtacgatgagtcgattgtatttattttattttatttattttatttatttgattacgtaatatttatgatttctttgttgccccgttaataatttttttgatttcttctgatttgccactatcatgagattaagatctaaaatgctcagctaatattaattattattctactttatacaatgtcaattgaatccctagttgatagtataacttctcctaatcttcaagatgatgattatggttcattattagatttagttgaattggttaattcaaatccttcagagaatgttcaatctgttttacgtttattaaaagttaaattacaatcttcaaatgctaatattttacttagatcaattactttattagattttttagctgaaaattgtggtgcaatgatgaaagctcaaattgctaattcttcctttataaatgataatttattaccaattattaatgataatttaattcatttaagtgttaaagaatctttaataactgaattttataaattatcaaaatctttccaaaatgatgaaagtttatcaattgttaaaatcacattcaataatttaaaattaaaataccctgatttatgtaataatgcaattattaaaattgatgggaaaaatgctattactacctactactactactactaataataataatcctactactactacagatgatgatatagaattaaagaaagcaattgaattatcactgagagattcatctatacgagcgccaatatcagcacaatcttcttcacctcaattacaaaataatgataatactgcaattttacaatctcatttacttgaagaagatatttcaaaacctgataaagtaattgcattatatgatttatcatctgatgatgaagataccttatcatttaaaaaggatgatataataattattgttgaagaaattaataatgattggttacgtggttgtcttcatggtagagcaggtttagtaccaactaattatattaaaaaattaccaaaaattaataataatgatttaaaaaatttaattaattcattaaatgattcctttgatattgaaacaactttatctcaattaatggatttaaataaaaaggtaaaatcatcaaatttatcaagtcaacaatttgaatcaaatttattgaaaaataatttcccaaataaaattcaaaaaattgaatcaattaaagataatttatcaaaaattattgaattacataaattaaaattacttgaattacaaagtttacaatcaaatattgataatagtttacaaatttatcaaaatttaatatcaaattcaaatccattaaataataatactaccaataatactaatactaactatcctgatatttcatctctttcaataaatagttcaaatatgatcaacggaatgaattctccaaatatgggaatgcctatgggaatgaatcaaatatctccacaacttcaacaacctcaattacaacctcaattacaaccacaaatgcaaccacaaatgccaacaactacaggtagtgcaaattatttaatgaaataccaacaacaacaacatccatgggctccaacttaaacctctatttaggcttttataaacattttgtaacttttaaattcttaattgaaatcttttaaatcattccttcttaatattaaacttttctagaatatcacttaaacaaataaactcatcagtcccccaaaccatttcctttctcatactcaatgtctcatttgatgatttactcaaatactcaactaatctatcatatgtactttcacttgaacaaggtaaataaatttgatcaacccgttcccaaacactttcattttcatttatctctattcgacaatctttttctttttctttcattttcataagttttattataattaaataaactaatctaaaattaaacttatcataatcaactttaattttactaatgaatttcgtgaataactcagaaatacataatattaatccatcaataatataataaccataattaaccaatccatcataatcttttttcactatttcataaaatacatttaaatcaagtacatttattacacttattgatgatttctttaatactttattaactaattttggtgtaattgattggaaatttgaattaacgaaaacactgatattttcatccatttccattccatcctctatttcaccttcgttttcattatcatagcaagttgtaattactctcaatggtacattatcattcaccttactgagaactatatcagttaacgatatatacgatgttaattgcatcgatatgcttctatttataagaagaagtagtacaatgttaaaagcgtgtaagttgttgaagacgcgtctgtttgtttggcgttgttgacaatttttgagaatttgttcaatacatgaaatatgttaatttaaagggtatactgatcttgatcttgatgttgatcttttttcatacagatgaggacaatgcaaactcaatttgaggattatgaggatttaacaggattgaaatattccttcaatgtattcccaagaaataaagaacaagagaaaaaatgtacaataccaatttcatgtctttatcaaccattaaaggaaaaggaaaatccaattttaattgaatcatatccaattgcatgttttaattgtaaatcaattttaaatcctttttgtatacttgattcaaattataaaagttggtcttgttcaatctgtagttatagaaatcaattacctaatgtattaaatcaattaccaattgaattagatccaagttcattagatgttgaatatataatacctccattacaaaataataatcaattatctcaattaaaaccaatgattttcacttatgttgttgatttagctattgaaattgatgaattagatgctttaagggatagtttaattaattcaattgattatttacctccaaattcaatgattatgttaataacttttggtaaacatgttaatgtttatgaattaggattaaatgatcatcaatcatgttatacttttaatggatttaaagaatataccaaagatgaaataagtaaaaaattaggtattaattcaaatttaaataagggtaatataactaatagatttgttcaacaaacaaatatttgtgaatttacattaactaatatttttgagtcattgaaaaaagattctttcaaaattctcccatatcatagaaacgaaagatcaacaggttgtgcaataaatgttgcttttaatatattaagtatattatatcctaagattggttcaagaataatgttatttactggtggtccatgtacaattggacctggacaaatagtggaaacatcatttaaaaatccattaagatcacatcatgatttattaaaagattctaaagttatcaaaagattcaaaaatagtaataaattttatgaagatatagctgaaaaggtttcaattaatggtcatacagttgatattttcattggttgttatgatcaaattggtttaagtgaaatggaatgtttagttagtaaaactggtggtgtagttgttcaaagtgatagttttacaagtgctatttttaaacagtcatttattaaatttctatcagttaatgaatatggtgaatcccaatttggtcttaattcaacattagaaattaaatgtaaaaatgttaaagttaaaggatttattggtcatggatctccattatatttgaacaataaagataataataataaagataaaatcaaattttcaactgagaaaacttcaaaaggtaatattggtattaatggtacaaatattttcaaacttggatcaatttcaaatcattcaacatattcaatttactttacattagatgagaatgttattggagattcatcaattattcaatttataacaagttatcaacatcctgatggattacagcatattcatgtcacaacatcccaaagaatgattaatttaagtaatgattcaatggattcagtcattgataattttgatcaagaaggtgcaactgttttaattgctaaggaagcagtttataaagttttaaatcaatcaaatacagaatcattaaagtttattaataaaattttaatagatttcatgtccattttctgtaaatttcgaataaatgatgcaagttcaattattataccaacaaatatcaacttattaccacaatttttatatcatttaagaaggtcaaattttattcaaattttcaattcatcaccagatgagatatcattttatcgtcattgtttctttatggaagattgtttcaattcattaacaatgattcaaccaacattaacatcatatgaattagataaagaacctgaacctgtattattagattcaacatcaattaaaccaaatagaattttatttttagatacatttttccatattttaatatttcacggatcaataattgctgattggcgtagacaaaaatatcaagagttaccagaatatgaatattttaaagaatttttagaattaccaagaaaagaggcagcagatattttagttgatagattcccattaccaagatttattgatacagaggatggcggatcacaggcaagatttttaatgtcaaaattaaatccaactacaagttattcaaataatcaaattcaacaattaaatgatattacaaattatcaaacaaatccaaatgatgcaacatcaggtgcagttattctgactgatgatataagtcttcaaatgtttatgaaatttgtttatgaagcaatagttaaaacaacataaactgtataagtaactaggtgtatagattaataaaatttaaataatatattgaattcctgacaatgtcatagatttcatttcatactaagaaaaaaaagaactcaaaaattacgaatcccagacatttccactcaatgagggagaatgctgataaacagagaagcagcagataagtgcaatgccagccaacactgtccagacactgacggatttgaatgatctcccgtgtcgactcaaggtaagtatgccaaaagagagtgaaatatatagaaaatacaaatgttgaaaaaaaagtggaaattgttctccttttatagtgaaagatgaaaatatcgcgaaattgaagagacttgggacaacatgagaatttattgacttaaagatggtaaaattgttgatttacactgtgaataattgtttcttttggttgatagaactgactttattagagtaatggcaccaggtggttataaggacgacacatattttattgtgcaaccaggatctgaacatactttactttcattaggattaacagatccattagaaaccccaaaactttctgttccaactgttgtttataaaagtaatgataatgatgattatagtttatcaaatgtagagggatataatgaaatacgtccgattattgcaggacgaattgttgatattaaagcacttgaatttttaatacatactttaattgtcacagtattaaaggaaagagaggaagatgaagaattaactgatttatcaattgaatcagttaatttacttataatacaatcatcaacaagatggtcaccattatctattgaattacttacaaaatatgcatttgaaaatatgaatgttcatggattttccattgtaccttttgaattagcttgtatgtttgctcatggttcaattgctaattcaatagtaattgatataggatatgaaaaatcagaaattttacctattgttgactatcaattatattctccaagtaagaaagttattgataaaggtagtttatctattaatcaaacgttatcaagacttttacctaatttaactgcaaagcaaatagaaattttgaaaaaatcaagtatatttgaatgtttaagtgaagaagatgcaaaaaaatctttctttggtatggaaggattaattgaaaatcttccaaatactgatgatggtgaaggtaatggaaatgatgaagatggtgttttagatattgcagctattgttacaagtgaaaaatcaactagagaaattttagaaagtaatacaaataaattgaagaataaacaaaagaatagtttaaaaccgaactcagaattagagacaaatactttttatgattttgatggaaatcaaataactgttggtaaggaaagatttcaaggatgtaatgatttaattgaagatttagtattgaatatttatcattgtttaagaaaagttccagatttaaagaaaagacaagaatgttatgataatataatttttactggtcaaacaagtaaaataaagggtcttaaggaaaaaattatgtttcatcttttcgataattacgtttatctatctgataataaattacttcaaccacaagcacaatttagaaatgatattagaccaattgatgatgcttcattaacacaagttccaagacatttaagattagtaccaaaagttgattatttcagtgaatggaagaaaaatggatttgaagattgctcatttcttggtgctcaaattctttcaaaacaagtattctctcaaggtaatgaattttgtttaacaaaggactcttatgaagaaactggtccaactgcaatatggtcaattcgtttctaatttatttatgtaattttaagtttaattttaattctttcaaaaacaacagaaaagaaatccagtttttttcttcgaataaacacatgttaaggaatataaaactattaagagaagacaaccatatataaaaaagaataataataatcatcataatctataatgacctttaataacaataaaaatacatattttcatacctgggtatgataacaaaaacaaaaacaacaacaacaacaacaacaaataaaattacagaaatattagcaaattcgtacaaattatctattctcctcttaatcttcttgctaaatgaatatccttttgcataatagtaactctctttgcatgaattgcacataaattagtatcttctaaaagactaaccaaataagcttcactggcttcttgtaatgctaaaatagctacactttgccaacgataatctgcatcattaccaaattctccttgaacaatttcacgaactaatcttgcaaatggtaattttctaattaataaatccgtgctcttctgaaatcttttaatttctcttaatgcaactgtaccatttctatttctacgtttacgatgttcaactggatctcctggttgattatttaataatccacttgatttgactttctcccttgcccattccgcttcttcctcatcagaatcataaatatctctcttcactacaatttctttctcacgaacttcttccttattacgttgtgaactttttcttgaacgtggtttatcatcacttgatcttttttgtgatccactatgacttttactttgtttactacttgattttgtagttggtaataccattggcgttgccttaaccttctttcttgccattgttcctagattctatcttataacaagaattcttacacctgaaacaaacagattctttattgttcattgtcaaagattccaaattagatctattattatggccaatttattttcttaagaaagtgcggaattcatgaaacagttgcaagtttttaatttttcccaattaggaaactgtgcaaaccagcaacgcgttaagctcactgcatttaggttaataatagttaacaaataagatgatatatacggatacagaagtaaagtaaataaaaaactgtaaataaaaataagtggaactagtgtgaaactcaaatagtatgaaaaacaagtaaaaacagtaaatttggaaaaaaaacgagtgttttcaattgaaaataatcaaatttgatgacttgaagcaaatgtggtagtaataaaatatagtaaaaaaacaacagtagacagaacagatgaaggtaaaagaatctaaaaccagaaagtaaagaaaaaaacagcagcttaaagaaagaagataataatagaattatgcttcatcaatttcagatccttgagagaatccactaaatacatcttcatcattattatcaagtgcttttttttcaactggtttagtttcagtttcttcagtttgtaatcccttaaactttttctttgcagcttcagaatcaacaactactggttgagagactggtttagaagcaactgcttgttttggttgttgcttgttactcttgaaaaaaccaaataatccctttgatttacctgatgatttgtcaggggtatttcttgcacttgcaacacctttaccagcaccagcaccagtagcctttgttgccttgaaattctttgttgtattaatactttcattaatcttagtttgatcaacaacatctgccattggaggtttttcagcggttggaacattaactaacggatcaccaccttctgcatatcctgaagccttaacctcttcccatgttttcttatttacaactttagttggtgcagatgatttagcaattgcaccttcttcaactggttcttcaactggttcttcttcaggtttttcaacttcaggttcttcaacttttggccatacttcttcaggaacattctcaggttcttcttcaatctctggaggaatatcaattgttgaatcatctaatgggaatttagaatctgataaatcatcatcattgatttcaccaggaacttcaacttctttacgtaaatgttctggatataattcattgattttcttttcttcttcatgatgttcaagagctgatgatttcagttctgtagatttttcagcaatcttagagtgtaaatcttgacggttagattctaattcttttctttggtctgctaatggttctaatttggattcttgttctttaccatcagtatttaatcttgtttctgcagccagtgcagcagatgtagaaactgcagcagtattagagatttctggtaaatcagcttctaattctgcaatacgttgattcataatttcaagtttagataatgtttcatctaattcagattgaattgcatcagctttagccttttcttcattataaacggattctttagcttctcttacagaaacaagttcatccagtttatctgattcagtttgatgttcttttaacaaaggagcaattgcttcatctctttcagccttcatttgattaagttcttcttctctaactgcatccttttcagccttggtatcattaagaacttttaatttttcagctctttcatcatctatctccttctttgctgcttcctcttcagtaacttgttgttggaactcttcatctcttgcgtcaaagatacctgataactcaacttttttattttcatgttcctcttctaaagcattttgatcaacaactaactgatctcttcttgcctttgcttcttctgctctcttcttttctaatgcaatttgtgctaatctttgttcttcctttaattcagcatttctttctctaattttagcaggcaattcttttctttgttgatctaatgttttagtttcaacaattctagtttccatatcagaaattgcaggttgaactaatgaagaagcaatttgatggacttcatcatatttcataactaaaccaccacctaaagcaattgagccataaggaacatcttttgcttttcttttagcagcattttcttgtgcaactataaaagcacgttcattaatcttggcattagagaatatgttttgagatgcaacatcagcatccattttagataatttcttattaacattttctgatgcataggcataaatatttttattaactagtaaattatctttaactgttgcttcaaaatcaacgtcattttcatttttagaaggttttaaatttaatgcagaagcggcaaagttggatgggtaaacagttaaacctttatcagaaggagtctcgagaccataacttctagtataagttttgcttaattcttttttagaagctgaaattgattgattgtaaatattattaatgtaaattttagaatcaatagttgatttatcagtacctaaagttgatttaagacctgatctatgatttttttctgggtttaatctcttatttaataattcatcagcagcctttgatgcatttttagtaatattaccaatattcatagatctagttttttcaattgctaaatttgaagttttaacaccacctctattatcttgtttaatatttaaatttttgagagaattatttgatttaacatcttgaaatttagataaggtaactttaccagatctaacatcatcgaattcataaagatcatttaatgcctctctagcaacattttttggagttttctttaaaacagatacagcagctgcagcatcatcattaattgcagttgaagaagtatcaaaattatcgaaagggaatttcattgatttagcagacattgcagcatattcagcttcaggagcaacacgatttcttttccagccaacaattgaatctggctttgcaattaaagcagcatgagcagcttcagatgataattcttttgaataagaattaattgatagatcagtattagctgctaaaacagcagcagtatcagaagctgaagggtcaacaccaattgaaactcttgcaggattattgaaaataccatatttcattttagctctataaattgcttcattacttaaaggtttatcatttgtttgataaacactatattttgaaacatttgatttattacttgttaatgaatgatgagaagatgtatcagcatatgaatttgctgtagccattaccattttcttttattgtttgtttgtttttcttttcctttcgatcagttgacttgtaaaaaaaaaagtggagagtggctgggttcgtataataagtatattaagcaataatataagaattaatcaattaattagataattaaattagaaaatatattaaagtgaagtaaagtaaagtagactgatattaatatagtaataaaatacaattgagtttaaaaaagaaggaaaggtttataaaagaagataaaaggatgaaataataattaattaattagagaaaatagaataagggattagcagaaagtagcttttttatcatttcatcatcggtaacctttatcaattgatagcgaaaagagcgaattttcgtgggaagtggtgggaaattgtgggattcctatgttaataggattatacgctgattactattgttttcattaaagccgtaaagggtaaaaaaaaaagattacctaaaaaagatacagacgcatcgacgccaagtttgtatcagtgtcgcgtctatttttattattggaggctcatcataaaataattttattttgtaatttggaggctcattttatccccttttataccctttttattacccttttcaattgcccttattgcctcttttcttgtaattgcccttctttttgttatatcttatttgattctattatagcatcataatcaagtataatcaacctttaaaataatcagaactttcaattcttatctatatcgttatcattctttaccttttgtcgtttatctttattagttatcttacattcttctatcttatcctctcttaaaattaataatattaatataataaattgtcatggctcgtcttactagacgttctgctataactcaaaaccatgttcaattacctttaaattcatctgctattaaagccgttgatgttccaattattcataaaggaaatttaattacatttgataataataataataataataataataataataataataataataataataataataatattgatattgataaaattgtatcagaatcaaatgacacaattgatatgaaaaatccaaactcaaagaatgatgatgataaaacaattcatactttaaaaaaaccttacaatagaaagttagattcaaataaggttaataaaatttccaaaagtaaacttaaaatttcttcaagatcaaaatcaaaattgaagggaaagcttagtactaaagtcaagaatatttctaattccactactgcaactactaccatgtcaaaattaaaatctgagtattttactgattttaaagataagtcagtatcaactgctaataatgataataatgataataataccaaacctgtaaaaagtaatgaaattattaaattattaagtaatgaattgcataatagcaaaaataatgatattgataaggttgataaaattaacaatagtgaagatattaatcaattcaacaaatgtatttgtaagaaatgatacaacaagtttgaaaaatcaaatcatttattccgattctactattaaacaacattcctcgaatccatcaagtgctcacttaatcgattcaaaaattttgaaagataacaatcaagttcaaaatatcaagaaaagaagtgaagatatttttcaattagacagagctagaccgaaaacacccattcaatttcatcaaaatataaatccatttaacctgttatcaaataaagaaaatcaaaatcgtatacttcattcaccaacaacaactcttgaaagaaggcaaaaagaacaaaaaaaacttcatgataattatcataaccatcatcacttaccacaatctgctctttcaaattatgatccaagaattttacaaactgtggatcctaattgtattttccatacttcaaaatcagaaacaataaataatagtaaaactgatagcatcaatatgaatgaaaattcacctcgtaatagttcaattataaaatctaacgaagcctaaaagttctcaatttgctgaaaagatactgaagcaaaacaaacatttacaaacacagcatgaatcctttattagagatgttagttcaaaaggtcaagataacttcttcaattccaatttagaagcttcacaacccatctattatcaagaatacttgattgatgattcaatttataataatcagatttcaatatcaaataaaagtcttgattcaacaagtttcgaattagattccaatcttacgccattatctcaaaacacaaatgatgaaaatataaacccaatcttttttccataatactccatcaccaaataatataaattcaatcagaataattactgcttcaaatagaatagaaagattgagagataaaaaattagttcaagcgattcatagaagtttaaattttgacagttgtggaaattctcagaatacctgaaccttcaatgggcgaacaaactcaaagatgtaggactcgttcaattaatagtaatttttattttaatcacaatacccatcactcatattttaatagaaatcatgacaccatcttatcatctccaagggatgaaatcaaagaaactttaaataatgctattttcaactcagttgatttaccacctaaaagactatttcaagcacatggatatgatgattataatgacaataatttattaataacggagagaaaagatgattataatagaatcaatattaatattcaaaataacattaaccatagaattgatagcaattataattacgataatgaagaacgtaatgataatagtgataaaaataataatataagttctgataatgcagattcaagcagtgatgattcaagttcaattgacgaatcagagaatagtttcaatggactagcatatgagaatattcatattaataatgttgaaaataatataattcagataaataattataaccattttgacttatataatgatattgagcagcatattgataataatgataatatcaataaaaaggaagacgatggaatcagaagccataatattattttaagaacaaaattggaaacaaatgtaggaatgaaatgagaaaaacatcaaatatgagatatcatgataatagaaaatatagtcaaagggtaaaacaaacattggataatcaaaatcccaaacatcaaatgaaatggaagccagattataaaaaaccattcaatagtaatccaatatttaacaataattattatctccaaagtccagtttcaattgaaagaggactgacatcgcaaattgagactaataatgccaataataaaaataaagctaaattcaaaagcagagttagatcaaataaagaaggtaaaagtagagctcgtggtaggggtaaacttgattttagagataaaaatcaaaaagttaagccgactgatgatgataatgaaaaagattttgaaggtgatggaaatagaaatggaataaatgaagcatcaaggtctgatagttataccattagggatcatccaaatatgaaagaaagtggagatgcagaaattgttcaaagaatattcaaagaatcaatgaaattaaacaaggataacttttccaaacataaaattgaagagaatgaacaacatttagtacctgaaataactagattaagaattgctaaaccaaccagttttgttgaagaaggtggtgaaaaatttgaagaaaaagatatctataaatgtgcagattgtcctaaagtatttagacagagatcacaatggaaaagacatgttgattgtattcatttgaagattgctaaatttgtttgtattgaatgtacaaaagcatttaagagatctgatcatttaaagaaccacattagaagaatacacggtgtttaatagaatttatagagatattacgtaatcaattaatagtaatgatagtagtaatgaaagtgatgatgacctttcaccaggttcaatgttcacctgttacctctttttcctctgttgttacatatcttctgaaggatgaagaagacaatgaattgtgtgaatgagcattgagagtaaacactcttaatagcatatatactaacaacaccgccaccccctcctatatttctaatagttcaaccatcccatttgtgctaacatggaaaatgattgtcaagttttattttattcccttgtttcaacgtatcaactatatataatatatattcacaactgtttatcaacatccgctgagaatcgccgtactcaaccaaattgtatcgaacccaaagccctgaattatttaatgtttagcatatattattactaatttcatttataaatttccactagtttagtcatatgatttcattttcaaagattattttccaacatattatatatatatattttaattttcattttgatagtttcccctttcatctttaaatttcaattgtaagtattccaaataactgaacacaacattaatgatacatcttatttcaaaattgttcaagttccaaatctttatacattactaacttttaccctttttttcatttatagttattcccttcaactgtaattccaaaatgtaatgaaagcaatacaaaattccatgtttggtaagtatacaatctcaacttcaatactccatcaatgttcattcacacactttattatcttatcatcttccctctgtataacaccttttataattgatgacatcaaaagtcgcgtctaattatctccatatttttcattattacgctttataatactgaatcatgataatttatcattcaattaggattgggtttagctactgataatcaatgaaacaggtactgaaaacaatatggggtaatgattttattacacttaacaattggcaattagtatgtctgtacatataccaaattattgcattaataatgttacctaaatttgacgtgtcaactgaactattcataactcggatacaatctagtaaagagtctatatatcatccattcattaaatcaatactagagggaatgatgtcatgggatagtgtatatattcttaaattatcaatggaaggaataacttatgaacatgaatgggtttttgcacccttattatggagattcatgtataaattacgtgttttaattaatactattttccaatatgaaatgaatgtttatgatattacattatgttattttataataaattgtgttttattataccaaatatgccaaatttcaaagaaaatagtggaattgataataaggaatgattatctcaaggatgtatccatcgattcaaatacaattaatttattcacttatcttagaccgattggcgtcatatcattaatatgttattcagaaactccggcacaatttttcacattttatggagtttatcttcacttatcatcttttacaaagtccaaaacatttatcaacagtaaagttaaatatttattatccggagttatgttttcagttgctttcggtattagatcaaattgtttactaatgggtatattatatttgaattgatttattcacactttctaggaaacgtgataaattgcttagtttattcacaggtgggatacttttcctatcattcatttacctaacatacttaccatacttcttatactgtccagaacgtggtgaatggtgtaattcaacaacaaaatctttagtttcgtatcttcaagttactagatggaataatggattcttaaattattttacattgaacaatatacccaatttcattatttcactaccaactgttctattcattgccttaagtgaatgtgacattgtggaatagttaaatctgttagagggttggtctatattagttgggtttatttatttacacaggttttctttatgaatattcaaattatcactagagtttcctcatttttgccaattacaatcattgcattatcattaggtgtttatgaatgtgaaatgaaagagaataaattagttcgtgtattgaatgatagtaaattcatttcaatatacttatttggtactttcatttggaattttatccaaccaatgttatttggagctttcttaccaccagcgtaagtgtttatagattatatattttatttttgttatagattaatattacataggacttgtgtaacttgtaggaatcaatcctatgttaccatttaattcaacttctgaccaaccagatccatcatcgtttattaaaacaacagtatcaccactacttacggttagttcatcatcaccctgtgcctcataatcatataaaactcgtacttgatttgtagctttaacagacttacgtggtacaacttttggtgggggttgcttcttctttactatagttttaatatatgatgttggaaccagaccttccataccagatgcatttttaatataagtccaacctgaatcatctggatcaagtatagttaattgttcatttgcagaaattggtatttcatcatcaccttgtggagtataatcatataatgcaacagcattggatgatgatgaaatggatgtagatgattgtgctacaccattgataggggtattataggcatcaaccaatttatttaatgatgaaaaaagtcttgattttttatttgatgaatcaatttggaaattattaacgttttctgaaagttgtaagatttccacaggttcattaacctgttcatcctttttaattttgaaaagactaaacttggattttttcgtatgtaattgatcatcagtaattgtcatatcaatatcatgagttacagcttgaattgtctcaatttcaacttctgcaacaactttattcgtatcattatttgtaaatttttgtaaataagttattgaatttaataatgaattttctaatttatcataattttcatttttaagcatttcctttctatcggataagagttcttcaagtgattgtttttcatcattacagatagtattatatttttcataagttgaacatgaattgttaagtttaactttcaaatcataaatggttgagtcactaataaccatatcttgatcatcatgccaaatagctgatggaataaaattaaaatcagtaggttctgcccaattgtatagattatgctttataaacattgcagtagtcaagatgaggtagattttgtacaacgatattatcaattgcggttaaacaagaggatattttttctaatgattccttttcaatatcagtagatgttttccaaatattgttaagtttagagactctacattgattaagatcttgtaaaccatctaaaatttcaggtaaatcttgataataatatttatcctttaatctattagatacagcaattgatataagataattgtttttagcaacattcatatgattttcctttttatgtaatgattcagcaattttttcattatttggagatttaatggatttagctctctgtgattccattgattgacaagctaaatcatatgatttcttcttacttgacatatcagaataattttcatctcttttagaaattaaatccttattaaattcattccatctattatttaaattaacatatttattatgcattgcatttaatggagttgaaatttgtgcatcaaattttgaagctaatgatttcttttcctttgatatattttcacattgaatgagtacctctctccaagcaacaactgatgcagattctaatgaaccgggggtaattgttggattatcccccactgataaaacagatgattgttttgccagtttagcaaaatattcagctgataatctttgtagtttatccgcatattcacgttcaattgcagctctctgtttataaaaattagctatatcattgacggcatcaacatttgcagaaacccaagcactagttctatcaaaaccgtccttgatatcgttccctatactaaattccattaattgcagagtcaattgaaatcaattgaaatcgtaattataaacataatgtaaaataccgttttttctcaattgggtacattaaataattttactcctcatttttaaaacattaaagcattgttaaactttacataaagcaagtccttttcttttattttaactacttcttcttcttctctgttacactcttcctttcgttctttccaacaaccaaatatagataatgtcatcagcatttgcaaaatttatggtatccccaacaggaccgaagactgtccatttttgggctcctgttatgaaatgggcattagttcttgcaggtgcaaatgaaatgatgcgtcctgtggagaaagtctctgcgacgcaacaattgtctctatttgcaacaggtgcaatatggacaagatggtcaatggttattattccaaagaattttttacttgcatcagttaatttcttccttgctactgtctcaattggtcagcttacacgtattgcacattggagaatgtcagtaatgggtgattctccaaaggaaaccgttaaatacatgtttgatatgaaagattagataaatttatattgtagataagtttactaaataggcaattattatttaatgattaatgttaattcacatattcttcttttttaaattaactactctttataatatattcatattcatattcatattcagctatataatattatcttgcacgattatctgctttatctccttcaatacgtctttaccctttggattgaacaatctaagtctctctaaaatatccatttcctctccggaatgttcatctccgaaatctctaccttcattatccatatccatatcgacctcctcaccatcttctctattattgtcattaccgtcttcgtctccttcttcttcaccttctctattattactatcattatcattatcaccatcttcttcaccctcctcttctttttttatcccaccatcttcaatacttctcaatcgtttctcacttctactcataatctctaatactttctcatcattaacaactataccctctcttacacatgttagtttatatttcataacacttctaattttagccatactctttaaatctatccaaccattatcaatattacatttatcgttaattgtacaatttttaatcaattttttaacatcatcatctaaaatatctccaagttggaaagataatgaattacatggatttttaccatcaaagaataattgtttaggtattttaccaatacctaatttattaatgtcactattagtatcactaaattcttcaatatattcatataatgtaggtggaatcatataaatattatcattcccaaattcatcagtagttatattatcattagtattattattagctataattttttcaatctcttcatcgtgattgcttttagaattacctctaaatgcttcaatttgatatttatatgcttctttatttttagatggatcatatccaaatttaataaatgaatgacgaaatggaccttttgatacagtatatgaaacataaggtaatgtaaatcttaattgatttcttaaatttttaggtaataaccaatgaatatgacgtctaatccaaacaggtttcatttcaaataatttacgtacaatttctaaacatttaagaaaatgatatggtgtactctcttcaattaatgatttatcaataccactatttttaatttcttccatttcaaatttcattttctctaattcaggttgtaatctttcatcataatttaatggaggtttttcattataattaatttgaataccataaagtttaactgcattattaacaaatttaccatcttcatcaataagtaaattaccaaaatatttataattataaggtaaatcaagtcttgcaaatctaactaatgaaggtaaatcaatatcattattattaaattcttgaattttttcaatatttccaccaatttcattagaaaattgacaaattttattaaaatctccaattctaatagattcattaaatttattattaaaatcggaatttcttttcaattgttggaaatcactcatttctctaaatttaaaatttttacttaataaaccacaagttttaacagtataatcgatttcttcaatttcacattgtttaatagatttcctaatatcaccattattaccatctaatattctctttggtattctaaactttaataatacatttttcttattattttgtacacttgatctaataggatgtgataatggatcattacgtaattgcaattgtaatcttaaatcaggatctataaaacattgctttaaaacagtttcaccaccaattaattcaattgccttctctgtattgagtacccttaatggatattccacagacattaaactaggtacatctaaatctatttccgtcattgatctatagataaaagtaaaagagtaaaagaaagaaacaaacaacttgttgatgttcatataaaacttactgcattatttacatgttgttgcttctgtaagcgaataatcaaaattagtgcttagttaattatatatcagtttcaaagaattcctctttctctatggatgatcaatgaatgcattgagatggaagagagtagttgatgattataggaatggagttgcatcagttgaatttttactatcaaaaggtttcacattcaggaaactaagtgtacttacaggattggataaagtatttctctgtgcagtgtgcgttttcgttaatgaagatattgaagatgttgttaaggatatagttgcatgttttagtgataaggatagattagaatttacaagacataaatcaattttacaactaatgaagactagaggattaacatttcaagaagaaattgaagcactggaatatgcgattaataataagaatgatgaagaagttgcccaattcacagaagagagttttgacaattggatcaaacgagttgatgttagggcagaagaggaatttgctgaatcgatacgtaaagtacagaaggcagaagatgaaatgaatgcagtggcggcattgcaaggaagggtttggaaaattgtgagggaaaatccttaactgtggaattgaatggaaaattttgtatctctatattactgtactactttcttttgtaattcattttgtaatgagtgtacgtagatcagctagggccaataaaggtgtccatagtggccatgctgatgttgtatcttggtctaataattataatgataataatgatgataatcaaaattctaatcgtcaaatacagcctttctatgtacctataccaaatgaaagtgttcgttgtttagtttgtaatacaactgacgataattatgatgaggataacgatcctaatggtgcaatggttgaatgtgataaatgtcaaacttggcaacatgttaaatgtatgtttggtaaagatgctgaagaagatgatgtacctgatgattatttatgtgatgtttgtttacctgaaaaatatcaacatttaaagaaaaaaataagttataggaaatatttaaaggatagagggactaccattgctgatgaatataatgataatgataatgatgaagaggattataatgataaaaatgttgatcgtgatgattatgacgatgttgttaaagaacatatggtaaatggtaaagttgagccattgaagagaaaacttgtcacaagacaacaaccacagcaacaattgaaaaaagtaaaaacttctttaacaacttcgtcatcttcttcatcgtcgggatctagatctaaatctaaatccaaatctaataataatagtattattacattacgtcccaaaattgttaataattttaaaattaaactacaggaacttatacctaaagatgttaataatgaaatactaaatggtaattcaattgatgaattatcattgaaatgggcaaagattttagaggatgggttatttaataaatatccaaataattatatcgaaagatctcgtatgttacttttaaatttaaaaatatctaaacttgtagaacgtgttattaatggagaatttaaaattgaagaattacctaatttatcaaaagatgatatgttaacaaaggaaatgaaggaacaagcagatttagttaaaagagatgcaattaataaagttgttataaagcaagatgttcaaccaattattaaacatacacataaaggtgaagaaattattggagattctgaatttcaatttgatattaatgataaaagggagaaggaagttgaaaatatgaaagaggaagttaataatgatgaacgtgatgatattcaaactattaatgattatagtgttgaagattatgataaagatgataataaaattaattataataatgaaaattacgaaagtgatgataatgatgataatgataatgataaagaaaatgacattagagaacttagtgatgaagaatttgaaaatataattaatattaagccaatagagaatgttaaaccattgattgaggagaaaaagatcaaaaaggttaagaaaagtgttacaatcaatgataaaccgataatatttcattatacaccagaagaggaagaagaaattaaagaattaccatcaactaatgatatatggaaaggtataattaagactaatgatcaacaatatgaatgttcgttagattttatatcatcaacatgtaaaaatgataaacatattgtaattgatagaagtttaagaattataaatgaatttagtaataattctaaaggtgaatttatgacaattggtagattaaatagggatgttgcagagaaatatcttgataagattacaatttcaagagatttatacctttatgaagttaaatttaataaagaagatttaattaatggtaagaaatttttagaaatgtggaaatattattataataattttaaatttggagtcattaaaaatcatttaaaatttgttaaagattgttatttattatcattatcaagggagaaaatgattgatgcagatgaattttcaattattttaaataaatttaatagggatgaaatttttcaaaatttagatttagaaattgatgaatatgataatggtaatgaaattaataaatttaatgatttaaaaatgtatttagtttttgttgttcaacgtgatatggatgatgttgtttcaagtaataaaaggttaaatactaagaaacgagaagataagaataaaagttataaagagaaggtagttgaaagtaggactactattagtagtactggtaataataataatagtataccattaccagcacctgatgatgattatgatccagctttatctattacattatccaaactgacaaatagtagtaatcagcaagaagatagtagtaatgataataagcaatcaccggatatgttattagagggattacttaaaaatattggataatgatattgattatgattatgattataatatatatataataataaattactgtataatagattactttactaaagaagaagaaaaagaaaaaaaggaaagtatattttgataaatgaagatataacaagataaacttaacgttcctttcttttatgttcttttaaatttaacttaattttttatatttgatattgatataatataacattgatataatatattttataaatgattttttaattttaaactaaaatttaagcctttgctaaagctttcttaacagcaaagtttctttgtttctttaagactaaaacttggaatctttcaaaatcagataattgagatcttctttctctttgagcaattttctttgcccaacttgtctttgaccattttgaatcaatttcaccagcagcccattttttagtaacgataccagtttttgcacctcttggtaaattatctaaaactaaaggagttaaaacaactttacctaaactaattgattgtcttgcaacatttggaccatcaataaggactctcttttgatcaataatttcaacaattgttgctaatttattgttaactaaaacaactctaccaagttggactaatctccagttggttgaaacgaccttagattctgcagacattgtttgatttgtagatgtagatagattatatgaaagtataatagaaattttaagatagaaattcagataaattacagataaatttgtaaataatgaataaaatttcagtagataataataataatagtaatagttaataatcatgatagaattttactatgtaatatggaaagaaaaaaaattatttttttccaaatgcgtggtgtgtggagggttggtttcccaattgggaaatggggtaaataaaagagagggttaagccctgtaagatgtcacgtgtagtttatttcgcgaattttttaatttctataatttctataaattttcacagtatttaactaaatacttctattactataaaaagggtggatattaagtaataatggatgatatactctactgtattaactcttaaagacaagaaactattctactttctcttaataatattactattataataatataatgatgactgtataatttgcgttctagaaatagttgtattcgaggctcgccggcttcattatggatcttctatatatcatgcgaccaacttatttaactgattgtattatcataatagtaataatatagggagatagtattttcttttttgaacaaacgaagttaaattatatacttgattacataatattatctactgtttacaaatttgttacttacttggttctttgattgtttgaaccttcacttttggtgattgttttctttattatattgtgtattcaagttgtgtttgtttctttttcttaattaattttgtttatactgattcttggtagaatagcattataagtttttctatattatgatttttctttatttctgccaagttaaattctgaatttgttttaaatttcttatataacttatttttagtttggaatgatgtatacagtactcattgataatttcacattcgaaaataatgtgattgaggttccctttttgattgcaaaatctgcattgtgagtgaaacgtattagctagtaaacctactagtgcttcaaaaacttggttgaagttaatatgatcactgttgtgaagacttagaaactttggctattattaaagcatgtattgtattaggtaattcgcgtaatgtatccaagtatgtaactatttgctatatatttactatgtagtatatatctaatctatctatctgtacagtcctttattatctcctctcatcttattataacaatgtcaagagcttcacaattagaacaaaataatgatgaacaatttcatgcacttgcaaataaagtttcaattttcaaaaatattgcaaatgatataaataattatgctcaacaagataataataatttaaattcaattaatgatcaaatgaatttacttagtgataatttaaggaatactgcaaataaattaacttatgtaattcgtagtaatccaaaaattactaaattatctgcaattgctttcattatattcttattaatatattattcaataaaataccttttctaaataaacaaatagttaaattatataattaattaacatttaataattaatacttaccaccaataacattttgtccaagtttataattaccaattgatttaccccattgaatctttgctctactaattggcattaaccttcttaaattcttaaatttattctcatttaattcattaatcttctttaatatcttagtttcataatttgtatcaaatttattaatctcgttaatcaattcattaatttggaaacttccaatattatcactctcttcaatattatttaataaaacattaccatcttcataataatgaatcttaatcttacttatattacttaatcctttattttcattatcatatgaataaacactaacccatttaccattataataattactatcattaagtctctctccaacaataattatcttataaccttcactaaatggtataaccattccaatactctcatcattataatattcacttaaatattcattcaattgtttttgtaaattgttaatttcttcatttattgtaatattactaggtaattcattctcaatatcaattactttattattaataaaatcataattaaattgaatttcttcatttatatcaaaaaatttattataatttctattataattataattggataaaatactatatttaccattatttaatctaattaatttaatatcaccaccttcattaagtgatttagtatattgttcattaaataattttgaaattaatttattagaatcggaattgtttaataatgatttaatatcattaacaattatttcatcattaccagctggtgatgtttcaatgattttacgtactatatcttcaacttgtgacattatttgtccaaatgaatggaagaattgaaataacttcataataataatatattagatttggtcctatatagagtttattagtgttgcatcgcggtcttctaagtgagaccctctcttcggatacctttatcaacttttaatgtatttaaatttatataaaacttttataaatgaattctataaatgaataatatgaataaataatattattatactgtaatcaacgacctgcattggtattcatataggcaattaatccacttggtgtaacaatccattcctgtaatggccttttaaatctatgttcataattttgtccaactcctgaaacatgtgacataacttcaaaacattggaaatgtctatcaatcatttccctactttgtggtttataattcttttgataatctaataaaaccagtttattaacccatctctcattctcagttaatggtatcatacatctaattgaatctcttaatattttacgttgtgccgcatatgtatgcttattggtattattcttattgttaacttttgaaatgtattctgtatatgttcttaattgttcatttaaatttaaatttccaatgggtatattttcttcactttcaatatctgtatcttcttcatctccttcatttctacctccatcaatattaaattcatcttcatcttcatcaaccaattcatcctcttcctcttcctcttccatttcttcttccatatccatatcatcctcttcaatatcttcatcatctacttcatcatctccatctctatcttcaccttcatctctaccttcatcctctaataaatttgtagaatttgatgtatcatccattctattaatctttatttctttccttaaataattcccttgattagaaacatgtacttgaccttctcctaaatgaattaaatttaatacctgaactgtccttcttatcctttttactcttaaataatgtctctaaagatggtacatgaaataattttttatgcccattactaacagaacctcttctactagaacttgaactaccccttctatctttatctttttctttatgtctgtatgaatcatttaacatttgtgatgatgttaaacctaaaccaaaaacaatatttttagtcacactatgattctgataccttctacgacgtctacgtggtacagttctataatttggcatttcacgtcttgataaatctaatgaattatcaatacctaaattaattgcattataccattcaatcataccttcagcatttttaaaatcaattaaaaattgttccgtttcaaatctacatctgaaaacataatcccttttcttataatcaattgctaatccaactttaccatattgtaaactataagatctgaaaattttcgtagattctaatgatttgatggattttaaaaaatatagtgcctttaaatcagttttagttgtcataattgatctataattatcttcattatatgaaactttatacttttcaaatttatctaattgattaattgcacttggacatttaataccttgcagtttctttaaatataaatgatgatgatgatatggatgtaataatgaatgtgaattagaatttgagaatgatgatgatacattaaatttatcaagtattttatcatgattattattatgattgatgataccattagtaacattactactacctttgataagattgttatcaatttcataaaaatttaattgagtattatttaattcaacaatataaggagtccattgtctctgttgtgccatttcatatggtgaaatccattccattttcctataaaaaacaccgattttataaactgttggactatatcttggtaatgattcatttaatgattctaatgaatcatatgatggtctatcaattctaggtaaagttgaagtgtatgatggtggttccattgggaatggttccactatattcaaatactccattgttgaatcatcaccttgagaatccatttggtttccagagtaaagaagatagtatagatcagatggaataacagaaaagaaaggtgtctctttgacaatgaaaacttccattaaacaacttcctattgatcatccacacaatttcggagaaacgctttacttaaacaatagatgcatgccgtgtgctgacattttaattacctttcacttctttctttctttctttctttctttctggagttgataggttctttgtatgtatctattctatacctgatcatataatgtcgtctgggccctcacctcgtagacagggaagtggtttgttacctcaagtatcggaaaattctccacttctaataccaccacctcaatctcttcctaacaattcagatgatgcatcaatggaatcttcaagttataattcagtatcatatatctccaattcaagagtgataccacacagaagaactccagagactttggaatctctttcattatcacaaaaattagcttattatataccctgttttagttggataagtgattacaatacgtcaaatcttatttatgatataatggcaggtttaacactggcatcttatcaaataccacttagtatgtcatttgcaactgctttagctcatgtgcccacatcttctggtcttttgggattggcaattggtccaattgtgtatcttttcatgggtacggttcctcaaatgattgttggtccagaggcagctgtttcaatgattattggtcaaactgttgagaaaactgttaaacatgcaggagttgattctgtggatgttttatgtaatttaacctttctatccggtatggtattgttgattttcggaattttaagattcggttatttagataatgttttatgtggtactttacttcgtggatttattactgcaattggtttatcaatgattttaaattcaataatctcaatattaggattaaatcctattttatccaaattacctccagatgttcacattcattcagctgttgaaaaatttatgtttttaattaatcattattatgaatatcatcgttttacagcaattattggtggtacagctttccttctgttaattttcctcaatcaagttaaaaagaaactcatcaagagtaaattcaaatcagcatcctattttcctgaaattttgtttgttattgttttattcacagtattttcctacgtatttgattttaagtctaaaaacttggaagttatcggcaaagttacaatggatgaattccaactgaaaaatcctttatcaattgaaagtagaaaattatggcctgaattattcccagtttcatttgtttgtgcaattcttggattctttgaaacttcaacagcttcaaaatctttaagttcaatgttacaaactcctgtatcttcaaatagagaattagtatcattaggtgctgtgggtacaactgtttcgttttttggagcacttccatcatttggtggttacgctagatctaaattaaattcaagtattggtggtaaaactcctgtttcaggattcgttatgggtattacaacattacttattactttaaaatgtcttgattatatttattatttaccattatgtgttttaaatgcagttatagctcatgttggttataaaatgattgaagaaactccaaaagaacttaaatttcatatcagaacaaaaggttggaatgaaattttcacatttatagttacattatctgcttcattatattattcaattgaagttggtgtctctatggggtgtttttattcattaatgagagttttaaaacattcaactcaatcaagaattcaaattttaactagagtcaaaggtactgatacttttgtcaatcctgattcagatgactgttctgacacaaatctctttaagttcccaaaaaaaattattgtctctggttataaagaatttagacgtcaaacaattattgaaaataaaaatatagataaaggtagtaccactaataatagtaataatctgttaactccaccttctcctcttactacctcaatgaatagagataaaaatatttcaaatgtatcaaatatggatatatttcctaatttagaggacagagaagggtgtattattgttaagatacctgagccattaacatttttcaatgcaaatgatatgaaaggtcgtttaaaacgtattgaattatatggatcagctcatagtcatccaggtggtacacctcatgaagataaagatttgagacatgttgtttttgatttacacggaatgacaagtttagattcatctgctgcgcaattattatttgaaattgttgataattatcaaagaagaggtgtaaatgttttttttactagattatttcatagtacacagttagttcaacgtttgaaagatgctggtatagaggaattactgttcattttagatggtgaagaatttggtatacaacaaaccataagaccttattatgatggaatattagatgctctaaaagcaattgataaaattgattcaacatgtgaatgggaaacaagatcttatttttcaacaattgatttcgaataaaaatagtaattactatatataccaaactgtcctattattctacattctttttattcatttatttatttatctaattacattacatttggtagagtgtatattttatacagaaaaaaacttccgcttttctaattgaactatatcttttgtctttttgaactacttacttcctcttcgggatcacttaaatctaactcttcgccacttattgcatcatcatttgaatcaccatcttcacccccattattttgtgcaataacgtaataatccaatgcaccggggaaaatatcttctgaaattaaacttgcaagttcttcgccattacgatattctttaccttctttacgacccgtccatgaccaaaatgaaaagaatgatctcataccttgtctgtaaaacttcttctcttcagaagttaattttctattctctttctttacattggatttaattgtttcaggatcaattttttgtaaatttattggccattcaaatgcaactttttcagaaaccaattttctcatacctgtggaaggatctaattcccattcaaattccttggtgacttgttgttctttaattttattatctttattttcttcagtatttttaaatgacatagtaatggagaatgcctttttaggaatcaatccatcatcatcaatactgtttttaaattcaacgtatatatcagagattaattcaatatatttcatatcctctacactgatatattcctgaaattcttcatgttgtgctaatacaatataccaaaatttaggtatttgatttaaataaattctacgattttcgtaaattggtttgaaaagttcattcttaaattgttcaactttttcttcagcctttttaatatctgattcaatttcttgtaatttcaaaaatgaggtttcaacactgttatcagtttcactgctcataataagatctctaatggttgttccagaagaaagaaaaacattattataaacacccatatagaacaggatgtaaattttttcaacaatcattttgccaatttcgctttacaaaagggttgagccccgttattcttattaaaatgtacactgattcttcctttttatatacacaaaacgattatataaacacttattcgtcatcatctaggatgtattcggatagtatctcttctctagtgggtctttggggccattgaagattatttacctcagaaacacctaatgtaaccatacatccgtaacataaattaacactcgtatcatcaacagtttgattagatgattcaatttctttatcgttattaattgattctagatatctttgataattggccttctcttcttcattttgtggtggtacatgatctaaaactgttatttgttcaagccattgttttggatcatggtaaattgggaatttacaaatttcacatctatgaagatttgcaatgttttcatcattatttgataatttaccaccaattttcactacggttgaaacggtttctggatattcaatttctaatgtttggaaatattcactaatcatatcattaacggtcttactcttcgttgataagtttgaattaacattttccacacttaaaattggtgataacttatcaatacctagtattttgatatatgttttaatttcagaatttaaaatatcagataatggatgcatcatctcaaaagttccaatatatttattatcacaatgtcttggaatttctgctccacgtccacgaatagtatctgaaagaatagtaacggccattctagtcattgaatcacttttaagaattatgctacatttattatcaaccgctgttttaatagttatatcctcatgaacaataatggaaagatcttctcttgttgtcgtatccttagcttgatgtaataattctgaataactcttaatatttgtatcttctatatcatcttttatttttaaagtttgaaatttcttaatatctaatgaaagttgttcaaatttattatcagtaacaaatgaattacaatcaatttcaataaaggatacgcctaatttttgtaattcctcaatcccataaaaattttttagtttagcaagatcgaattgaaaatctggagaatcattaattacagaaacaattaattcaaatcctaatactgcttttggaccttgattggactgttccattaacattgatatcacactatccagtaaaacgtatgattcctcattattttcaaaatcaagtaatactctaagtttagtgtgatcaggtttgactttgaatttaaccttaaatttatcatcttgcatttgtttcctttgcttacctctaataaaacgaataaaacagttttcacagaatgtatcctttcttgaagtgacagttgtgacctctttcttacaacgtttacatatatctcctaactcagccatattttattcccttgtagtatatttatagtacacataaaataaaatcaaaataaaatcaaaagaaaagtcagtgataaaagtaatgaaaaatggaaaataaaaaaatttcaaaaacttcccaaaagggtaactatggcacagccgtaatcgagattttgatgtctccgtctgtcacttcaatggatcgatgttaagactgttgattagttatcattcgtttctcttaagattagtgtttcattgactatacccacttatttgatgagctctgataaacagccagcacaggaacaacatcctaaaggattggcacctacattaactaaagatgacatggaatatttagataataaaacattaagaaaaatcgaatctacaactgaacctgcagtgacaaaggaatttattaaaaaggctgatgataataaaacaattgaagatgttagattttatccagatagaccaactcagcgattgcataaggatagatttattattaaagaaccttcaagatattatgatccatgtgctgaatcttctaaaatggcaattagatgtatggaaaataatgaagaagattataaagaaatttgtagtgaatattttcaagcttatagagaatgtaagaaagaatggatggaacaaagaaggaaagataatagaaatggcggtatgtggtaaagttcctttaattaacaatttcttgtaaatacatggtataaactattaaaactacattacaatacaatatatcatttcattttattattgatgttatttattatttaaataatttaagcgtatttaaatgaatacatatgtggattggtatcatttccaaatttaaacattaacaccttatctttatcaacatcaattttttcattttcttctataaagctatcctccgattccttaaataatgaattacgatcaatttcattatctaaatttctattatttttacctcttttattcttacttttccaatttttacctttttctttggatttttcattaccttttttattataactagatttagttgaatgtttcttccaaaatttttgatattcttcctttcttttactataaccattaataattgatgggtttattaacatttgtaaaactaataattgtttaatttcttcagattctttaaatctatttttcttaatccattttttgatcttttcagtatatggaactttatgtttagtagttggatttctcttatgcatgaaaagattaagtactttcccaaaattttgaatatcagtaaataattcaccattattttgttctttactccataaattaatatccatattacctggagttaaaaataattcaccagttttcctttcaatacatgttaataaaactaatttcattcttttcatttcagttttactcgtttctctagttgctggtctataaagtttgaaacttgaaactaatcttttctggtgacttcttgaaatattcaaacttaataacagtctagatacacgtctagatctttctgttgaaaagatagcaccaaatggattttgaaattcaagatattcatcaccatctgatgaacttattggatccaaaattggatgtggatcagaatatctttctgttgataatggccagatatgatgttgatattcaagaaaagtaccattatcaccattaccctcaaaatcatcatcgtcatcatcatcaccatcatcatcgtcgtcatcattattatcatcttcctcctcttcttcgtcatcctctccaacatcattcattgaagtacccacttctccgccttcgaccattccttctctaagatctatatcatcatcaccatcttcatcataatcattactattattattatcattgttatcatcattttcattttctgataattcaaatgggttcatagcagaacttaaagctgtaaaaccatcaagttcaatatcatcatcataataatcttcattaccatcaatcataccaacataaccttctgatctcaagaagggaatttctccttgtgattcttcttcacttgattcaccatccagaaatgaattaagatcattaataccattgctatcacaataaaggtcattgtcaaagaattggattcttgtttcctgttcttcttcattattagctattaaatcagtttcatcaataaagctattgattgatgagtttctggataccgggttaagaatattattgttgctatcatcattgatttgtgtaggattagaatttgagtgtgttcttgttcttgtattggtttgtgttaaaagattaggaaatactgtaacttctggagtagaattttctgaagaagaagatgatgatgatgatggtaacgttgcaccaagtgtatgtctttcatagtttcttcttgtaccaatacttggtttaataactaatttatttgcataataattaaatattcttcgacgtttataaattgaatcagaataaatttttctaccctttttcaatttgctttttgattttgcttttgctttgaatgattttgcttttgttttattattaatagtatcagtattctcctcaaaaagatgatgaatatcaatttccaactttaagaaaataaatttagataatattaaatcaacacattttttgcaaattaataaattttcaggattattaacacatttcctattagcatgaggaggtgttggaggggatggggtattaataaattgatttaaaggaggtaaatcaaaccatttagataatattttataagattcaaatttagaatcggataaatgattaattttatggaaaacagaaccattgggaaaatttgtattttgaattggtatgattggaatacttttgatatctcttaaaacttttgcctttgatttattactcatgatataacccattctattcatactaaaaggtttccaattgtttttagtataacattttttcctagttttatcgaaatatttaccaaacttaccacttgaaactaaataatttcttgttaaattactaatagcattaccttcaattaaaatatctgatgaatctttatatcttaaatcattattttgaaaatcgacaatttcaccagagaaggaaagttgaacgtcactgaaattaatcattccacttacatttaatttttcataatcaacatttgtaaattttatattaggtttcaaaccatttattgattgaggtaagaaataagatgccccgttttgtaaaaatgaagatttatttaatttaactgtattattattttggaaaaaagtatcagttaaatctgatttcatttcatcgacacaaaattgattataagtacgtttacgtttgatgtcaaataatgaatgattcatattaaaagaactagacaaataattatcaatatcttccttttgagtgaaatttcttgtaattaacaattcatcgagtaatgtagttaaaccgaatttttgcatttttgctggaatattataataaatttcatgatctatatgatttgcaaaaatagatttattatcaatatcattatttctactatttttattaatttgacttatagcagccatttcatcattagttgattttaataaagattgataataatgattacaagcttcattcatttgagattgagattgaatatcatcaaatgtattatctctgggatgattatattctagtacaactggatcacgaataaataagctacttctaggttgattgttggtatgggtattattattattagtattattattgttgttattattaccatcattttcatcattatcattactatcatgagatgaagcaagtaaatgtcttaaagaagatctgcgagtagctctattagatatttcaaacatatcatcaaaatcatcattcatcatcatcagtgttattattattattagtagtagtagtattattatttggtatagtaatttcggagtaaacgggtagtaactccgaaacatggacagatcttgaggataatctttgaatatgagataaatcaccatcattatcgccatcaccatcattaatatgcggtgcgagcctgttagtgatgttattattactcatatcaatagtgttatagtgagatataaatgaataaagagataggtataagaagagataagtataagtagcaagaattgttattaatgccattataatctaaaaaggggacatcttgtaaaagagcgggtaattaatatagctaagttttttattttctgtttatctctgaaaagtataaaaggagaggtatttcctctttttttttagttttttcttgtttctttactagggagagcgttttgcttcatggtacagttagtgtacttatgggtatttcttatattattttatcttatcttatcttatgttatctcttatggttcactctgctatcacactcactgtgaataatcccattcttatcactgtttgtcctgtttgactatactttatcatcacttcactggtgtctgatctattcacatcctaattatattttggcgtctggtttttttttacgtgtctgggtttaaattacccgtttgatcaaatgataattttaagtcattaaactgtttatgtccattactaaacagatggaggtctttatggttgattcatataatacaatattactttctatcattgcaatgttgttgccgtccgctattttgtgtcatgtatgtgtgtctttacgtgccactgctattattttcattatattacattttttttcgtattatgtttattccagttggaatatcctagtacggatataataatgtaatagatatagatatatgttcaatttaatttctattacttatttgctattttgcattccattccttatttcattatttcaatcctgtatatttctgtacaatcttttaacaacatcactctacatctaattcaatactactactatcattctaaaaacctattataattccctttaataacacttaattcgtcaataaaatcgctttcttttttggcgcttgctgttctcaggtctccaccaatttccacattttttacttttgcatgtttttttttctctttccattacattcattttgaataggtttatcttatagtttgtattagatttatctttaaacaagaacatttaatcttcatccgttcttgtaatcatgcccatacacgacgaaattgaagataatcctgaactttatggtttaagacgttctggtcgtgctagaactcaaactgaatcttataatttttcagatgataataatgatgatcataatgataataataacaatggttacgatgacgaagatgatgatgatgatgatgatcaaataaatacaagaaagagaagaaagagacaaaattttgattctgatggtgatgatcagtatgaaaatgaaatcaataattatgatcaagatgttagtgatgatgatgatgagatgaagatgatgtcgaatatggtgctaaaaaatcttcaaagaataaaagaaaaattattaagaagtcatcaaagaagaaacaaaaatctgcaaagagtgttgatatgaattctcaagcaattagattctcttctcgtaataatagtaaaagtattaattataatgttgatgatggtaatgatgatgatttacttgaatctgatgatgataataggaaatgattatgatgatgatggtgatgattatgatgaaagtgatgattattatcaacaatctaataataattatcaatattatgatgaaactcctgaacctactgcaactattgatttaattgttaatcatagagttattggtgatgatttatcatctgatgaagatgatgaatgaaatttctgatgctattaaaattgaagaaactgatgattcaaaagaattaattaaaaaagaaaaagctgcaaagagaactaaaattaaagaaatttttgaacatggtgatccaaaatcagatttcgaatatttaatcaaatgggttgatgttgctcatatacataatagttgggaaacttatgattcattaaaggaaaaaggtttaaaaggttttaaaaaacttgataattatattaatcaatatattatcttagatcgtgaatatagaaatgatccatttgttactagagaagatattgaacaattagatattgaagctgaaaataggcaagaaaattttaatgaatataaaaaagttgatagaattattgattctgagagaagtactttaggataatggtgaatctgctttgaaatattttgttaaatggaaaagattaaattatgatgaatgtacttgggaattaggttctgaaattgcttcattatctccaaagcaagttcaaaattatcaaaatagacaaaattctaaaattttacctgcaaattctgcttcatatggttcaaatagaccaaaatttgaaaaattaactgatcaaccctcatttattaagaactggtgaattgagagatttccaattaacaggtttaaactggatggctttcctttggtcaagagatgaaaatggtattttagctgatgaaatgggtttaggtaaaactgttcaaactgtttcattcctttcttggttaatttatgcaagaagacaaaatggtcctcatttagttgttgttccattatcaacaacgcccgcttggcaagaaacttttgaaaaatgggctccagatgttaatgttatctattatatgggtaatacaaaggcaagaaaaactattagagattatgaattttatgttggtggtaataagaaaaaaccaaaatttaatattttattaacaacttatgaatatattttaaaggataggagtgaattaggtagtttcaaatggcaatatttagcagttgatgaagctcatagattaaaaaatgctgaaagttcactttatgaagcattatttgaatttaaaattgcaaatagattattaattactggtactccattacagaataatttaaaagaattggctgcactttgtaatttcctcatgcctggtaaattcaatattgatcaagaaattgattttgatacaccaaacgatgaagctgaaacctatattaaagatttacaattaaaattaaaccatatattttaagaagattgaaaaaagatgttgaaacttcattacctggtaaaactgaaagaattttaagagttgaattatcagatattcaaactgattattataaaaatattttaactaaaaattattctgctcttaataaaggtatcaaaggttcacaattttcacttttaaatattgttgcagaattaaaaaaagcatcaaatcatccatatttatttgatggtgttgaagaaaaagttttatcaaattttggttcaacaagagaaaatattttaagaggtttaattatgtcatcaggtaaaatggttttattggatcaattattaagtaagttaaagagagatggtcatagagttttaattttctctcaaatggtcagagttttagatattattggtgattatttacaacttaaaggtttaagtttccaaagattagatggtacaattaattcacataaaagaagaattgcaattgatcatttcaatgcacctgaatcaaaagattttgttttcttattatcaacaagagctggtggtttaggtattaatttaatgactgctgatactgttattatttttgattctgattggaatcctcaagctgatttacaagcaatggcaagagctcatagaattggtcaaaagaatcatgttatgatttatagatttgtctctaaggatacaattgaggaacaagttttagaaagagctagaagaaagatgattttagaatatgcaattatttcattaggtataactgataaaaaggtaaccaatagtaaggctgatccatcaactggtgaattaagtgaaattttaaaattcggtgcaagtgctatgtttaagaataaggataatcaaaagaaattagaaaactttgatttagaggatgcattaaatcatgctgaggatcatattacaactccagaattaggtgaatctaatttaggtagtgaagaatttttaaaacaatttgaagttactgattataaagcagatgttgactgggatgatattattcctgaagaggaattgaaaaaaattaaggaagaagatgaaaagagaaaagaagaacaattccttaaagaacaaattgaaatgtcaacaagaaaacgtaaagctgcaatcaaatctggaagtaatgatgatgatgatgaagatgatgacgatgatgatgatgatgatgatgatagtgcacgaagaagtaaacgtggtcgtaaattagatatgaataaattaacagaagcacaagttaggagtgtctatagggcaattcttaaatttggtgatgttgaaggtagaattgatgaattaatttcagatggtacattacctaataaaaatcctgctattattaagaaatgttatgatgaattagttgccaagtctaaggaattagttgaagatgcagaattcaataaaaataatgaaattaagaaattagaagaggaagctaatagagaaaagattgaaaatgcatcattaccacctaatgcagatagatcaccatatccaacacctaaattacaggcattaaatgcaaagaagagagagaagaaggctattttatttgattttggaggttgtagaaacttaaatgcagagactatattatccagaccagttgaattagatattttaaggaaagttattcctagtgacgatataatgaaatttcaatttaagattgaaccaaaaccagtatatggatggacatgtgattggaaaagtgatgatgataaaagtttacttattggtatttataaatttggatatggttcatggattcaaatacgtgatgatccaattttaaatttacaaaataaattatttttagatagtacaacaggaagtaccaatggggcaaaggcagataaggagaaaccaagtaaacgtatacctggagctgttcatttagtgagaagatgtgattatttattaaatttcttgaaggatatagttaatggtacgattacagagaaagataatacatcattaccaataaagaaggttaagaaacgtataaataagaaatcttcaactcctgatgtatcagaaaatggagaattatctggatcatcattaccatcaagtgctacaacagttggaagtggattatcaattggaaattccaatggaagtaatggaacaaattatgtatcaattgcgtcattacctacagggcctaagagacaaggtacatatcatccattattaaaaccagttgttgaagatttaatgatatgggaaagtaagggtaaaggtatggaaaaggctgattgggcaaataaacttaagacatcattacttaatattggacgatgtattgaaaatgtttcaagtgataaaaaaggattaaataaagagttatggattgaagcatgtaaatcatggccaaagaagggggtaaatgccgaagacattaaaagagtgtatttaaagaaggcgaagaatactaaatgaattaactaaataaatgactaagtgatctttgtgtcttactgtatttttaaactaatattttatatattttatattatattatacataatcgatagtaaataatgtacctttaacctatatataactcctagacttagataaaggagagataaatttattaacccaaataggaaagtgtgcgtcgtcacatactaaaaatttgaaaaatttaaaatctctgtcaagttaatgaaaattgaaaaatttttcactttttttcccattttccaacattctcagtgattccatttgccttcccactgtttaacgttttcttttcctttgcctttggagtttttcccccctgagtttcctggtttttgctgattttctttgccttctcttttgatttatctccttttggcagaacatatttttagttttcatcgtcgattaatcgcccagttagcttttttcaatttatagttggactcattaccacacatatctagaaaaaatcctttatttctaaaaaaaataaatcaaaaaaaactaaaaaaaattaaaaaaaattaacaaaaaatcaagtattcacttattattggttaagttttaattacacttctctaatctatattaacaaaacaacacacaaatttatatttatcaaaaaaaaaaagaaatcatcaattagaaaaatgtcttctgctgatattaaccaaatcactgacaatgttgaaaaattgtcagttactgaaaatactgaatcaaccccagtcactactactgaagaatccccagctccagaatctcaaaatgaaaccccatcttcattatatgttggtgaacttgacccatctgtctctgaatcagagttatatgaattatttgctgcaattggtccagtttcttcaattagagtttgtagagatgctcttactaaacaatctttaggttacgcttatgttaactatcaatctcatgctgatggtgaaaaagctttagaacaattaaactatgctgaaattaagggtaaaccatgtagaattatgtggtctcaaagagatccagcttcaagaaagaatggttcaggtaatatctttatcaaaaacttacacccagatattgataacaaaactttacatgatactttctcatctttcggtaacattttatcttgtaaagttgctactgatgttaatggtagatctaaaggtttcggtttcattcattatgataatgctgaatctgctaaagatgcaattgaaaatgtcaatggtatgttattaaatgacttagaagtttacgttggtccacatatcttaaagaaagatagagaatcaaaatggcaagaattagttgaaaactacactaacatctatgctaaaaactttaacactgaatggactgttgaagatttagaaaaattattcaacccattcggtaaaattacttcaatctacttagctactgatgaaaataacaattctaaaggttttgctttcattaactatgaaaaccatgaagatgctgttaaagcagttgaaggtttaaacaatactgaacatggtgataaaattttatatgttggtagagctcaaaagaagagagaaagagttgaacaattaaagcaacaacatgatgctgttaaacaagaaaaaattaacaaatatcaaggtgttaacttattcgttaaaaacttagatgattcaattgatgatgaaaaattaaaggaagaatttgctccatatggtaacatcacttccgtcattgttatgaaggatgaatctggtaaatctaagggtttcggttttgtttgtttctcaactccagaagaagcaactaaagccatctctgaaatgcaccaaagaatcgttgaatctaagccattatatgttgctttagctcaaagaagagaaattagaagaaatcaattatctcaacaaatgcaagcaagaaaccaaatgagattacaacaagctgctgttcaaaatggtatgggtcaatttgttgcaccaatgttctatggtcaaaattttatgccaccaatgactaatggcgttagaggtggtccattcccaaatgcacaaaaccctatgatgattcctcaaggtggtgcaagaccagatcaacaaatgccaaatttcagagttgttaatggtcaaccagttccagtttatgttcaaccagtttataacgattatcaacaaggtagaatgcaacaacaaagattttaccaaaacagaccaaatcaaatgcaacaacaaccaagaaaatttaacaaagatgaacaatcattatctcaaattctttcccaaattccagttgaacaacaaaagaattacttaggtaaccaaatttaccaaaagatttctgaatctcataaagttgaagatccaaatgttattggtaaaatcactggtatgcttttatcaatggaaaatgaacaagttgtttctatcttagaagatgaaaatgtcttcaatgaacaacttgatgaagcaattaatgtttaccaatcttataagaatgaagaaccaactgaagctccagctgaagaaactgcagcaccagttgaaaattaattttacgactgattcatttctttggtatttgtgacattcaatattaaaatatttttttaattggggttaaaaagacaatttatttattttattgctttgtcaaaatttttaatgttcttttctttatttttcatcttttcaatttttttttaataagttgatcaaatcaatttgttaacttttttttggaaatttatttgtgtttgttttatttctctatttaagttaattgcctgagctatatattacattagacattatttagtctactctgtttttacttcactttgctttagtaattatataatttatattttatatagggatatatttagtgtaattaattttcttgttttttaaagattttattgacgtttaaatctatttaaattctccaaaatccattccacttccaatatcattttgtaaccaggcagcttgatgtgttatatcattccataattccaaatcttttgtagttgaagataattgatcaaaatcaggtatatcatcaacatgattaaacattaatgataaacttggagaaaatggcactaagttaggagtactatcaacttctttaacatttgattgttggtttgattcaaaaccatgattattagtattatttgcaataaatgatgaaaaatcattatgaattactgtagttggattatttcctggtatattattgttattattatgattcgtatttaaattattatattgattcttctctctttgttgttgttcttggaaatcacgaaactgtttaactgtgaattcagtactattacttaaatgttttaatgaatcaaatgttggtttgccatcatttggtgagtttccaaaactggtattagtactattatggctaatattttcatcaagtgaaggatgatgtatcatatttcttgaattataattcatattagtattgggttgtgaagtactagatgatgaattattaacactcattttatgcccatatgaatcatcaatattagcaaatgataatggagcatataaattatctgtatgcttttcaattaagtcactcattgcactattaaaatttaaaattgacataagtttaagtatttgttctcttcttaaagttgctggatgattacctaaattcctcattttagtaaataatgttaatgcatgatccaaatgttcctttgttgcctcatagacaccaaatgttgcatcaaataatacaagtgttgcagtagcattaaataaatattccctatccatatatccaaacattgcaaccatattttcaggaactaatgcccataaagatctaattgtattaattgatgcttgaaatgatgcgtttagtagtgccaaaataactggtgaataagtggataaatctaaaaatttaccctcttttggattagacgactttaagtttgtagagacaaaatggaataataatggtctaactgctaaattaacaccttgaaaatactctgtcatcatattgaccacaagtctcgaaatatcaagtttaggtgcagaataatcacaattaatttcatctggtaatcctttcttccatgtaagtaaagaaactactaattcatgaacaactggtaaaatgttggatgatggttgacgtgtataaagattccgtagaatatttgcattaatttgagttattttgacacaattactgataaattcagcttctggatagatataattttcacaacccggtggtggatttgacatatcaaaatctcctggtaattcagttagtatatcttcatctgttaaagacaaaggtaatccagcctttgaagctaacattctttcatacatataaactgtccaccataatcttcttctatgttcaagttcatatttatttatcgtatcctttcctatatcaacatgcaatcctaataacaatgacgctcttaaggcaattccaaaataaaagtatgaagcagatgtacaatctgcaacttgtaaataaaatgcatataataataaaacttcaattccaccttcccttatacaattatcaattgacccacttgagaataaacctgtaaatagatcacttgcttgattgaaaaaccctgatcctggaagttttgtatttttatgtttcttatgtttcttattattatttggttctgctgatactggttcattaggtgatgattcattcacttgctgatccctgagggttagattgtttattattaagtttttgtttctttcttttattcttatcgtttattttataaccattcaaatagtttgcagttcctaaatacatttcacctattgcaaaaatcaaaagtagtttacaaaaccaaatagtttctaatgttggatctttctctgttgcgttattaatactatcaataccataatctaatttgaatccattattggtatcatcattataaattcttcttaaattttcctttaccaaaccttcattgaaaaagtaaaaacatccatcattataagaaataaatgaatcaactaaaagcattgcataactataacttggtaatgtaaaattaacatcaattcccggtcgtgaagtagttttacctaacataattctataagcatttccttctttctccaatatagtttcattatttaatgaattaccataaatattattatgagagtctgtttgacctttatttgattcattattcatacttgcaagtattggtttaaccaatttattaatttctaaaccgaaaagagtcattgatgatgatccaatatataatcgttccccagttctggagtgaatcagacgaccattcttttcaaggaatggagatatgaattcttgtgattttttatcattattcaattttgttgattcatcagcagtttcattcttgtttttggcatcactgttatcaaaagtttgactcttggtatcattattaaagtttgattgtgattcaatatttgtgttgctcaaactagctgattttttcaatgatctaagattagcattttcagttttaagttttgaaatttgttgttgtaatctatccaaatatttaatactgataaccactttcttttcagcttctgtatattcacaaactaaattaaactgtttacaacgtgaacattgtttcccggcaccatcacatttaatatgtctatttctacatgttgtacatgctaaattacttctctttttcggtggttgttcctgaaatgttgctgtatttgaaatatttacatcaccagagcttagatctggtgctttttgataatttttactgtttgacatgtaattatatcaaataagttataacggtttattttattttggttactaactagtagatatgtcttaaaattgcagttcaattgatgaaataaaacctgaaggtgaatccgagatatattaaggaaccgtgaaatagtggagatccaataaatttttaatttgagattctgcaccgttaattaaatcaaaaaaaaaccaaattaagacttctcccatacatgtgcagctttgagtgatttatgactatatataatgattacgattataaatacaagcagtaagctgagatcagtgttaaaatctattatgtgtactgtataaaaaattaaaaggtaaacgtaaagagaagaaaagaaaagaaaagtaaagaagatactcttataatttagtttcttcaagtttttctgtaacagcttcaactgcagcagaagctggagctggtgattcttcctttgcaccaggatatcttgaacctctatccttaactttctttactttcttcttttcagcaactggagcaggataacctgctgtttcagaatcttggaaatctttgttattcttatattcttcaataattggagctaataagacattaatagcatctgcaacacctgattttaaatcaactggtgataattcttccttcgtgaaagaatcttcaagttcttgatatgttttgaaagttattggaccaccatatttatctggtctatcaataaagaattcaaaggtaccatcaccatattttaattcataaattggacctaaaacatttttaacgaatgctaataaaccattatcttcgatattaccgggtgcacagaaagcttgattaatcttcttcttaacagtttttggttcttctaataaatcgattttagaatttggatcagaagcggacattttaccaccttgcattaaacctggaaccatacgattcattaaatgagctctctttttataacctaaagattgaatattttcttctgctaaaacgaaaatctttctttgatcaacaccacctaattgaacatcaacttttaaatattcttcatctaaaacttgcattaaaggataaattaaacctgaaagtaaaggatttgcaacttgtttaacaacatctgcacctgctctctttgcatcattttgtgaaacagaatttgataatttaaataaatctaaagtatattctggtgtaagttgataagatgaaccaagaacaaactttaatctttcaactggaacattaattgaagttaaaattgatttaataagaaattcataatatttagctctatgttgaacaacttctaatggagctttcatattatctaagaaagcatgtaaatcagcaactaaaacagtaacttcaacacctgcttttaataaatgtgctaatttaatcattggaacaaaataaccacaatgtggtttacctgttggtgcagtaccccaataaacttttaatggtctcttttcaacttcaagaacatttttaataatttgtggattaagaacttcttgtaagtttctagttataagttcgaattgttgatctggtgtaagttcagacatatttatctatagaaagaattgattgattaattaatttcaaagaagtgttcttttgcaagataatataaataatatattctgtatctgaaagatcaatttattattattactcatataattcatggtatagaatgttgaaatattggaaaaactcaaaatttcacaattatttctattttgcgtcgcttggtcgttggtttggaatttgtctgttgcttacttttacatgaatataatcaatgtagaaaccttttggattagagggtttgttaaggtactggtcatagtatcaagatatataatcacttataatgagtaattcatttgacattgatccaatagagagaaataaagaattttactttagattttattcaggtggatttagagatattgaactcggacatgaatttcttgaatttgatatacgacatgaaccaagggaagaatttgcaattttaagatatgcaaatcaaacaaattatagaaatgaagatttaattaagaaagaagttaaagtttcaatattagtattacaagaatttattgatataatacgaaaaagtcaaattttattagaaagtgatagaaattggccaaaagttacaagggaatcaaaacaagaaattgagattaggtatggtaagaataaaaaattatttaaaacaaagactatcgtatcattatcatcaattcgtaatgaagaagaaaaggaaagtttgaaaattttctattatcttgcacaagatttgaaaactttagtttattccttaatttcattacattttaagataaaaccatttaggttgcaataatggtggatattgtatatatatattatatatagatctatatggataatgtattaatgcttagaaaaaaattcagtcgtaaattagcagtaaaaaaagagtaagttatgttagtttcccccttgttaaataatatcacgtttaaaagttaaacctcttgatccataaagttgatttgattcttgaagattagttttactatcaaatgaatcttcaatatcttctgaatcattatatttttcattgcatggtttattttcataaacgtctatagggggtctattttcatatctatcagaggataacattggatctttcatttgatgataagcttcatcatatactttagatggaatataagtgtaactatctctatttgaattatctaccaattgttcattcataaatggattcactatattttcatctacattataagaagaattgtagtttgtttctgtgttgttatagttattattagaatgatcaaaatctgaattgttacgtatatttggaattgatttattaactaaattaactcttgaatgtgacattggtaaatcggtcagttctatctttacatgatcagatttatctaatgaaactattgattcattcatattatagttataagatttttcaaatggattattagttgaattattcaaagaattgttgaatgtatcattcattggtatatcatcataattaaattcatctaactcattaaattctttatctaagtcaggatttttcaaaaatgaaggaacttttcttctctttgattgttccttttcaactaattgagcctttgtttcatataattgagatacacgttgagcaactaaatcaaaacaataattattaaactttttattatatttcctctttgaagttgaaataatacaaattgaagataaaataattataatatttttacaagtgaaagccaaccaaacaacaaaagagaaaaacataaatgataaaaggacagcttcctttttatcattttgagcaatttctgaaatgacagcttttaaattaccacttgtaaattgatttgagacgacaaaggcaattgttgcaccatttaatatttgtcttggagaatctgccaatatccaattaattaaatcataatgataagatgtataaattgataaacataaccattcacgtaaatttttactttgaattttttcatagatacaaaatctttcaaaacttcttatagaatctatatgccttgcacctgaatgtaaataagatgaaacgattttatttctatgttgaataattgctccaaggatccaaaaaaatataaaataaaggaatgaaataccaatacaaactgtaaagacaattttatatgctaatatgggtatataagtaattgtatgagaactattccaatttttcagagcataaatttgaattaaagtgaaaacatctgatcctaagaataataattgtaaaactataccaaatattaggaaaaaataacttaaaatatttaggaatgagcattctctataattatgttcaccctttatattatcgaaagtaatttgttgaggatcttcaaatataattgaaggtttagttttcattgatggtttttcaagggataattgggttgtagagttcattataggtgcattttctaaaccctattagaaggctgaattaagaaaagaggagtatataatagagagtataaggtatatacagacaaaccaaacaaaagatcaatatataattattaatttgatttgattctattttcagccttgattcatccatctcagttatatatcaaaagttgaaacgtaaataaaaaaattatatttttcagtttcttaggtaattttctttcttttttattataaaaccgttatgaaacaattttaaattaatacttacgcgtttttctttttctatttttaaattttttttaaatttaaattatttttattttatttttattttatttttattttatttgcgtatttaaagattcgaattgatgtgtatgtattacgtaattttaaaactaaaaattggttcacgtgacatgcgcatttgcaaaaaaatgggaaacaccacagtatttatctaagccacagtattaattaaataaccttagttaatacaagcgccacaatgaaagtttttcaaaaaatttgttgaatctcagaataatttcctaatagggtaactacttgttatcctgattgtcatgattcatgtccctttaaaaatatcatcagttattgtacattgatgtttgtttgataatgattaataattaatatcttcaggtatatatccacagctttatatttaagccatgtattcccatacttctttaacccacatctttcccttgatcttatttaaatatagctgatcatctcatctcatctcttctactttaaacttttattctttgtgactacaccccctctgatatacttaaactttacttctactattaataccctttcacttatatatccttttagagtaaagtatattagatttatcacagactataatagtaattaaaaaaaattaaatttcaaaaatttactattattattcaatatgacagatcaacaaaattacaataaaatacctgcttatgatgatgaaaaagttgtatcttcatcagattatgttaaaaatgttttcaaaaatccaaaacaaagatcaatttcttatttacgtgatcttttcccagttattgaatggttccctcattatccctctcattggcaatgggttttatcagatttaattactggtataactgttgcaattgttttagtccctcaatcaatgtcttatgcaaaattagctaatttatctccagaatttggtctttattctgcttttattggtgctttattttatttcttctttgcaacttcaagagaaatttgtattggtccagttgctgttctaagtactgaagttggtaaaattattgttagatttcaaaataaatatggtgatgaatattccccaaatgaaattgcaactactttagctcttatttgtggtggtatagttttaggtttaggtcttttaagattagggtttattgtggaattcatttctttacctgctattatggcttttacaactggttctgcttttaatattgtttgtggtcaattggctggtttaatgggtttcaataaaaaagctggtaaacattctacaacttatcaaacgttaattgcctttttaaaacatttgcctgatactaaggttgatgctgcttttggtttagttgatttattcattctttatttatggcaatttgttcttgaaagattaattaaaaagtatgaacataaaccaaaaattaaattgatgcttaattatattttaaatattagaactgctgtcgttattgttatttcaacttgtatctcatttggtgttttaagatatcatccacataaagaaaagacaccttattcaatcattggtactattccttcaggtttaaatcatgtcggtagatttgtacctcaacctggtttagctactaaattagcttcagaattaccaatttgtacaattgtcttagttttagaacatatttcaatttcaaaatcttttgctagaattaatggttatagagttaatccagatcaagaatttattgcaattggttttactaacatgattggtactttctttggtgcatatcctgtcactggttcattctcaagaactgcattatctgctaaatgtggtgttaaaactccttttaaagctgctttcactggtgcttgtgttttattagcaacttattgttttactgacggtttctattatattccaagtgcaactttatgtgcaattattattcattgtgttacaggtttattagcttcatataaattaactactaagctttacatgttttcacctgttgatttcattattttcattgttggtgtctttataactgtctttgcaactattgaagatggtatttacttgggcaatgtgtgcgtctgctgctcaattattatggagaatgtgtattactaatggtactttcatgggtagagttaaagttgcaaaaatttcaaatccaattttacaatctaatgtatcaatcaacaatggaattaatgaaggtgaagattcaaattctgaatatgactcatataatcgtaataaattagattctgttaatgaaacttcaaatattaaaactttagaaattgattcagttggaagtttaccaaataatactaataataatgataattatgtctataaatgggtcccacttccaaatgaaagttttaatccaagttttgttcatacttcatatatcaataatcaaatcaatgttgaaaaccctccaactggtgttttagtttatagaatggccgaaagttttatatataccaactgttctgcacaaattgatcaaatcatcggtaaagttagaaaatctttcagacctcatgatagtaggtagagaaagattatggtgtgaatattcattagatgaaaaagattggagtttagatattaaaaactggaaaatggatatgcaatatttatccggtcttaaacatagaattttttcatcaaagaatcatcgtcatgataataatcataacagtgatagtggtagtgaggattaccaattacatgtcgataaagttgaaaatgatataaaattaccagaattacgtgttcttcatttagatttttcacaagttgttggtactgatgctacttcaattcaaagtttaattgatctaaaaaatacaattactaattatgttggtacaaattgggaattacatttcagtggtataattaatccttgggttattagaagtttagttaattcaggttttgcaggcaatattgataaagaaggtgatgaattaataaataattatttagataaatcggttaaaccgcttttgagaatatctaaaagatacagtgataatgaaaatagtgatgagacaaatattgtcactgaaaaacaatttaatggagatttagaattaggtgttaatggagatggttcaaaattccctcttcataatacaaatttccctcgtatattcatggatataccaacttactcagaatacgaatagtttaaaattatagaattttcattaaaactttatgtacattatacttttactttgggtttctttccttttatatctttgctttaatagttaattaatagaaattagcataaattttaataaacatttcaacgtcttgttgaacgacgagttggagtattttgttcagtttcactattttcatagaaacttttaggtttccttccacgacgtttaggtgttggtgttacagacggtgtacccagactcgttattgatggatctggtgattcagctttctgtttcttaacaattgtatcatcattggctacaatagatctcttgcgcagtgatctacgtggagcactggactcttcttgttcactttcttgaccttcttcatcatttgtttcgtcttgctcttcttcaacttctttatcctttccttcttcattaccatcactattatcgttatccaatccttcttccacttgtgattcaacttcttcggcattagataccaccgcttcctttgtatttttggtatctataggtttagaatcatcatgtttactcaatgatcttgtccttcttgtttgctttgtagtactttcaacgatatcatttgtggttgagcgtttacggcccttacttaatggtctcaatggatcatcatcattaccggattcagaatttcttgtgttcgaactactccttgtacgccttccaataaattctgttggttcttcatcgcttgaagtctcaactttcccattcttagcttctgagtcagaatcgatagattttctattcaatctcgtacttcggcgtggtgttaaatcatccatttgtaaacgtcttctacctctacgtcttggtgtagaatctgataattcttcgtccgttattacatgaatagaaacatctttatctgaaatatcatcttccgctttatattgtgtaccttcatcggtgaaattgtttctggtcattgatttacgtcttgtttcttcaaagtgtaatgtctttttttcattttgttcggtctctttttgtatgtcaatgtgtaactttctagcttgtgatcttgtaagatgcgcaggctcttcctcttcttcgtttcctccagctgcttcatctttcagatatgcatccttattatctttggtttctgcatcaacaatttcatcttcttcttccttcactttattttcatctttttcattaggttctttacttctatctttttcaggttgagtggacatgtcttctttcgctttgacttctttttctgtcttatgatcatctttactttcaacaattacctcgtcgtttttttcagccacttcttcttcgggtaaatcgtcgtgtgctgtaatatttgaaggttgtggttcattttttgatgtttctatttgagctagtttctttgtattgcctgcgacaggttgtacttcaccagccttgtctaactcagcttttttttccaaattatcagtgttactaacaatttcctgctccttatcgtacttttcattgtccatctttttctcagatgataattctccaaaaactttgtttttatcttcatctattacaacatgttttgtttgttttttattttcctacattaacttcatcaattgtatttgttatattcaactcgcttaaacctttcaaatcataatattcgttaattttactctttatatcatcaagtttgatattcgtagactcaaacttttcattaagtttattttcaatgattgttaataatttctctgcgttttctcctactggtttatgaaaacatagtaacttaagcaggtatgcttcgttgctgttattccacattgtctatgattaatatgtgtacaagctgctgattaattgcaaacaactttgttttatccatgaatctaaattaaaataacatgaatatttttacgtaaacacggttgaaattaatatttaaaaaattacgtaatcgctagcattatctctttacataatcagattaactggtttttttctaaatattccacaatattagagatcatttcacccttatttttaccagtcttaatcatacctcctttacttttaatatatagtctaagcatatcattagtgcaatttttcaatttagaattatggtaatgtaatgcgcatttaacatcatttaaaatatctctatttgaatcttgctttttcacctttttaacattaggcgtatcaacatcttcctctgttctcttcaattcattataatttgaaatttgattatatttatttgatagtttatctattacctgtgtaagttctttgcttttctcaatttttcttttagtttcttccatagattgaaacatttcgtctaactctaactgtttctcttgtaaatttagctcttcttcattctgtgggacttccacttgtaaaagatgatcttccatcactttaaacttccatgccaatgaagggttggaaaatgttttaaatttatcaatgatagaagctttaataagtgaatctaacaaatggctatcattaatttcctttgtagaatctaattggtttacaaattctggagcttttcttatttcattaccaaatggaacttcaatcattgctaaggaatgtggatacctttcaagtgataatggttcaggatccattatacttgttggaatcaaataataaaatctaggataggaaacttttcttggcataccccaacataaaaccatcattttctttttgtataatgatttatacaaagctgcaaatttctcttgagagtcattaggttctttgtcttcatctgcaatcataaatgatgctttgtttataatatatgatggattaaaatattcaaattttcttgtaccaataacatgcaatattggcttctctttttcaccaaatttcatacaatcattctggatttgtttatctactggcatatactgatctgcaatttgataagctttgcatatttcattctttttaatatctttattattacattgaggaacgctcttacgaatcgcatattgtaacctattattatagttgtacagattgactttcttccattcaactgaagtgaaaggattgattcccttcacggctattttgatatctttaaatatcaatggacattgaaacaataatcttcgtactgttgcatacttcattattttttcttcgagtgattctaacactacttcagaaatatttggtaagaatttcttggattcaaaatccattggaaaatcaaatagttgccttagttccctcaaatcaacagaatcttcttctataaaacttgtctccacttcactctttacaaaagattgttgcgtattttgcctcaaaggaaatgggtaaactgttaccttggaatcatttaaatctctcaatttactctgtactctttgcttaatttgttcattatcattaaaaggggtaaaacaatcagtaaataaaaatactttcttactcgtgtactcttctgttttcattggaatattattaaaatctgctaaagattgatgtaaaagggaatataatgcatgtccaaaactttcctccacattagaatccttcaatggaaacattttcttccatttttctgattcattgtcgtatccctcaaggaatgattccattgatttgacattagttaaacatctgtttaatttcatgagcattcgttcgtttaaatcttgaagcctaaacactctataaatgccttccgcaatttcagatgatgagttttgatcgttctctttagtacaattacccaagtataatcccaaacctgtatgtggcatggttttcattagatttttgagcaagttcaagaaagtttgaaatataacccctaacttagagtacattgtgggtgataaatgtacaattaaaactattccttcatgaattttaaactcattcccatcaaattcgtgttcctgatcattcatattgtctgttcaccaagaatagtattctgttcaacaaagctctaagccagagaattaacgcaacttaacgtgtcgtggcggaacgaagcgctgtatacgacagaatttttataattcgcatgttgaaaagtgaaaagtgaacaaatttctaaggacctgttgttgataaatgattcggtaaatcatcttggttgtaattacatcttaataggtatatcattaactgatacggtatacttgtttaaccatgagtaaatttcttcaattagctcttcatccagaagaattcaaatctgttattcaattgtatgtattatttttaattttttttattttattttacttgattaattttactggaattttcaaatactaacataaaactttcaaaatcatcaatttattagaaaatgtttcaagaaatctctttatccattgaagatcacttctgattcagaaaagacatgttatgaattattaaacaaaacatcaagatcatttgcagcagttattaatgaattacatccagaattacgtaacgctatcatgttgttctatcttattttaagagctttggacactattgaagatgatatgagtattgatccaaagattaaaattcctttattaagaagtttttatgaaaaattagcacttaaagattggactttcgatggtaactctccgactgaaaaggatagagatgttcttattaaatttaatttaattcttgaagaatttcataaattaaagcctgaatatcaagatatcattaatgatattactaagcagatgggtaatggtatggctgactatattaataatgaagaattcaatttaaatggtgttaaaactgttaaagattatgatttatattgtttttatgttgcaggtcttgttggtcatggtttaactaaattatgtgtcgcatcaagtttcagtgatcctacattacttagaaagatggaattatcagactcaatgggtttatttttacaaaagactaatattataagagattataaagaagatcaagatgatggtagatcattctggcctaaagaaatctggtcaaaatacgctaataaattatctgattttactaaacctgaaaaccaagagaaaggtctccattgtataaccgatttggttttaaactcaatggcgcatattaaagatgttcttgtttatttaactatgacatatgatccatcagcatttagtttttgtgctattccacaagtaatggcaattgcaacattagcagaagtttttcaaaataagaatgttttcaagaaaaacgttaaaattagaaaaggtactgcatgtgatttaatattaaagtcaagaacttatgaaggagtattggaaatttttagttattatttaaagattattcatcataaatgtcctgtttctgatccaaattatcttgcaattggtataaaatgtggtgaaattgaacaatttattgaagaattatgtccaaatcctgcacatttaccaaagggtgttcaacctttacaaacagaaaactatttacgtgctttgaaaaagattgaaacagaaactgcaatcaaaaactttattaaaactgaatatttagctactaatgttatattaactttgttctgcttttcagcgatttccattatttacacttgtataacttatttctcaaattagtatttataataattaactcatttccttgtttattcctttgaatttgaaagaaagtttagtttttactttttggtagtaatccacaaaaacgttacatcaaattcttactatatttttatttttgcaaaatagtcaatttttcacttattgttttattttttcaaaatacaaatcaaagtacaaattctttgaaatgagtgattttatttttttaggtggctcggcactttacaataaccttcatatctcttcttcacagcttttttcaaccaaatttcaagctgaatataattcttaaaaacatattcatttcactaaggccaaagaaaagctattttactcttgttgatataggtcaatgtacagaaatgtcgataaaataggaaaatcacgacaagcaaaatgtcgtgactaactaaaagtacaaatttttcagggggctcaacttaaataatttacagagtctattcatgttaaataatacaaataatatacatgtgatataatcagaataatcactgctttcaaaatataagggcatcggataatgcaatgtcatcatgataatcataaccaaggaagttcttcattggtttatatataaccttttgacgctctctttcaagttctaaattgtcgttaataaaagaataatcaatttttacttttatatcttcaattttatgattatcaatattagcattgaaaaaataagtgagtttggtatcgttaattttcttagacataaatttcaaatagtcgacaatttcagatgataatttattgtgttcttttatggtttccactaaaatgggatacacagtttcgttttcacttccaccaaactgacatttaaccaatttaaaataattatcctttgaaataggcaaccctaaagctttgaaataatgcatcagtttaatgcctgtgagcttatatgaatatttagatatttgttggaaaattattttttgatgctcctcagttaataagtgtgtttcttctctaataccattgagtagtcttattgtacaccccaaatgattgttttgattattgatagatgataacagtgaataaaggtacatttgtttagtttcttttaatttcaagctttttaaaacatctagatgttcatctattacagtgaaatcatttaaatttggaatagatatgaaagacgctggtagtttatcgttagaaggcaacaccagaatatttgattctattaaattttccatgtaactcatacagttattaaattctaaacctgatagtaatttcaaacataatctattcttgatatcttctgattgaacgatagataataactgaagagctaaatcatttttttcatttttcaaaatcaaatcaaaaagtttctctataagattatctgtaacagaaattttagtcatcacttttggaagtataaattctaaaagtgttacattttcatttagtattgcattcactattatattcccataatttgcagctgctatactattcgttttttggagcagtttgatgtattcaatcaacatgatcgtgtcatttcgttttgatgcctcttctagtatagcatgaaaatataaagagtgcattagcttgtcatcttcaagatctggattttgtgataatgttttatattcagctaatgctaataaggatgcttgttcatactgtccatagtgaaggagtctgggtatttcataatagccaattgtcaaatcatgattttttaagaagtctttgtattgttcactataatcaccattacggtctttcataaaaattaagttcgacaaacttgtagtgttccttcctatatattctcctgggttgattgaatttaaaatattcaaagtttttttcattttagttgtagatggttctgatgatgtcttgacaatttgttcaatttggtttattctgttatcatttttggatgtctctgcttttaatttgttgaatagcatttttcgaatattattttgcatcatgttattatcattgtagcgtataaagcccctatatcttgtatgttatatatcaatacaagagtaacatgaattcacgatgaaattttcagtcaacattatttttcatgtactgcggagaattcttactaactaaatttccatgtataataaaatctcattcttttctatcttacggcccctagcttaaattccacaaagaagtttctgatacttattctttcagtgatgttcaaaagtgtaaggaatacttttttgcgaagacattattcgtcaaatggaggaaattcttctattaaagtttttgacagacatgtaaaactcttacaaaaagaaagagctgcacataacccagactccaaacatgcagagtatttacgtgacgaaattaatcgtcgtactattgacagattagcatttttaaaaacagaattcactaatgttttggattttggagctcattcgggtaattttgagagattattatgtgattcatctagagatttagttgatcctcaatggaaggcagatagagaattaattaagtcaaaaataggtaaaattttattagtggaatcttcacaatctttgcttttcaaagatatggattcagcttttaataaagagctaaacttagaaagaatcgtagcagatgaagagaattttgatgttccagaactatcagaaaaaaatcaatatgatttgattatttccaatctatcaatgcattggattaatgacttaccagaagtttataagaagttatacaattgtttaaaaccagatggatgttttattggatcaatgtttggtggtgatacactttttgaattacgtacagcacttcaattagctgaaattgaaagatatggtggtatatctccacgtatttcaccatttgttgaatcatcggatgttggtaatttaatgcaaaaggcaggatttcaaatgctaacagttgatgcagaggaattaattgttgattatccaaacgttcttgcattgattgaagatttacaattaatgggagaaaacaattcagttatgatgagtccacctgctttaactaaagatttacttttagctgttgaacctatttatagagaattacacggtgataaggttacaggtcatttacctgcaacatatcgttttgtatacatgattggttggaaaccaggaaaatatttagctaaaccggcacctagaggaagtggtaatatcagtttgaaggatgcgttagatggtactataacaagtaccactacattaaccgaagatgaaccaatcaaaaaataaattaaacacattattctataaaatatatccttgttatatagtcattctaagttctatgttagttgagtcatctgttgagctttttgagaaagtttttgtaattcaggggtcaataatttcctcttttttaagtaggtacagaaagtgacataaagatgcatcgccaataaattgtctttattctttttaatatgaaaggcagacaagacctctgctatttgcgtatctgatgctttggaaaaattaacgcttgaataaaacagagaaccaattagtttacctatactcttcttcttattgaatattcctttaaataagtcatcaacaattattgagataaaatgatcagaatagttgactattttagacttaacttcacggtttttagtggctttacgtttctctttaaaatagaaccttcgttcctcatgagttagctttttcaggctttcatcatcttcatctgcaccttcaagactattaactttgcgtccatttgggaaaacctcaatcaacactttaatagtttcatttgaatcagctaatctaatgtcttgtgtttttgatataccagcaacatcatctttttgtttattatcattaaaattatgaggactcttgttttcacccttcaaattagatttcagcatctttaactctttcatctttttgctcaaataactgtccaattgatcatcagttgcattatcaaagaactttttactcaaagttataacagtattatcatttatgaaaacataatcagagtttccttttagtgatgttaaaaaccgagttatcaaaactataagcttatcaactgaatattttgaaccagaaaagtaaccacttaaacaagattcccaaaatctgattcttgaagatgcactccaatttaaatacgaagattcacatgatcttaacaatgcataaaattgaccatcatttctttctactggcggaaagactttcaagctagcttctgatgattcattcattatagttagaattaatctaacgaatgtaacaaatttttcagatggcaacctcatacacattttaaaaagatcaaatttaagatctgaaattttgaaacttgaaattaatgacggactctctattataaagttgagcagaatatcattcccttttgatagttctttaactagacctttcaaaataaaggtaggaattgtgtaagtattgaaaatttcaccaaaagcaaacataatatcttcgtctgtgtatctaaacatatcagctatcatgatatcagaatcaacaaatgtcttcttaagagaaatcagcataataaaggcataaattttaatctctaatttagatggtgcagggtatagtggtgtaaaatcttctttaaatgaattaaaatcattgaaacaaaataattttttaacaaactcaggaaatctcggaaatagagtttcaaatccatcaaaggacagtatagtctcaagttgtgaagctaattgggttttgagtttttttgggtaatttatttgcatcaagttttgatagtttagtaaaacttttatatctgtagattcaaaattagcaaataaataaataagttcaataaagttccagctatcaatattatcattctttaaatcataaatctttttcgttaaattataatactttgaggtattggttgaatgtgttatgatgcgtttgactgattcaattttttcctctttgaataaggatgatgttgaggttgggtcccattccacgattgcgatcaaagcttcagaggcaaccattcttaaggttggttctatagagtatgtcgcatatgagaggaacaattggaaaaatttaatatgatcaaagggaacattatctgattgatatgcacaagttactattcgacaagaatgaagtaccacttcatcatgatatgttttaggaatgatgagtttattagtaatcaaaattttatcaaaaagtaatctcaagagtggtttctcaatcatcagattttcctgtagtaacatatcaaaaactttaagatattgaataaattgatcccaatttgtattcgttgaagatgatgaggaatatgcaatatttttcatatctcggaataataatgactctaatgaaagtattgagttggtaacccatcttatatcagtagatttactctttaggaaagaaatatatctctggaaatcaatatcatttatttcaattgcgtgttgcaatattttatcaatattagcacaagcaaccaaatcgccagcttcaaagaaaacgtgatctaacatctcataaatctcataaacataacaccttatctctttagttgaagaaatacagttcaatatcgtactatgcaaagtttgaacaaaaaaatccaaaatatcaatatcgaaaagatctgtgtgagcagtcaatatatttcgacagtatttcaacttttttaaagtttttatgtcagtagttttatctcctaattttaaattttgtatcaaacgtgcaataaatgttatcaaaatatctggattagatatcataaactctaaaactccagatttatctttcaactgaaaaagataaccgaaaaaactacttaatatataatcttcatttgtattcgaataaaattgataccataccgcttttaaaacattgttttcattaatatttccctcagtgttatcaactattagcaaaaataaatgacttagatatgcgttatcgaatcgtctaataatcaataaaagggcttgttcattaacttttgaaacatgtttgatacaattaacaaatattgacaaagctttcatccccccttcagattttagtagttgtggaccacgaagcattaattgagtaaaacattcagacaaatgaatttgttgatcttgaaatgtagagtttgaatctgtttgtttaatgatagtagattccactttttgaagtgtgaaaatcaacacaaaaagttccaatttcttattctttccagcctttgaatcatcaccagactgtttcctcctatctgtcatttctaatagaggatgtacctgtaagaagaaaaggaactacaatgtataatcttttcaacataaattcatgttaacataaaccatcaataccatgcgccgcaataaaagcggcgggtgaatttactattcattactgtacgtgtagtgaaatgctaacattgattcattaagttcattaaaacatgactatatattctatcatacacacacaaattctgctatgaatatcattctataatgacaggtttaccacgacctttgcaattttctattaatgtaaaggagacatcatcaacgggcgtcaaaccttccttgacgaaattttccacaattactttctcctcatgattagttactctaaaagatagttgtacttgattcatgtatgatgaaataccgtaataggtattatgaggaactacaaaatcaacaaaaaggggctttaacgatggattattcacccttgataagacatgttgataaatctgccaaacttgggtctgtgattgaggtgatttactcattttaaacgttttccaaatcacatttaaagtcatgtctatacctcccaatataataacatcaatccaacactagtaccttgatatgagtacctaacaatataataaaaatgacataatagaagcataatactaagatctaaaaataaaatagcggtaaaatttcactgcgcctcttttctttattaaatagcgaggaaatttttgcatgagtaggtaaaatatctgatgaaaaataaaagttgatgtttactattaagtaaggtacaggctacaactcttttctttttagcttgttcttctgtttgttttaccttaatagcgctcatttacacttcaaaggacaatagaacaatgaacacaatgaacactttgctcaccctcacagctttagctttaactgctcaagcaagtagattttcatctgaagcggacattttacaatttgataatgtcggatattcaggttactattacccagttagtaaaattgaagcattatctgatggtaactgtagttgtgaaaaagatttatcaaaaccttttacctttagtggtccattagctccattagatggtgatatgacagttcattttagaggtccaatgaatttaaaaaaattcggtttttatacaacttcagattatgaaaataatcaaagttcaggtttttgggaaagattagcttattatgattcagaatctaaaactgctgataatgttactttcttagctaattatggtcatgaaaatacatgtcttggtaatgcagctgattttgtatcatctgatggtttaaaaaaatcagattcatcggaaattttagatgatgtcttaattccaagtgcattagaatttgcaattgcttcaggtattgaatgtaatggtacatctgattgtggtgcttatagaactgatggtcaagcatatcatggttttggtggtggtttaaatagaatgttccttttcgaatttaatgcaccatctgatacttcagaagatgataaacaaaataaaactgatggttatgatatgccagcaatttggttattaaatgctcatattttaagaacttctcaatatccattaaatggtaattgttcctcatggaatactggttcaggtgaatttgatatctttgaagttatgaacttcactgaaagaaataatttctactcaactattcatgatttccaaggtactgatgatattggaactggtttacaaaattttggttatttagaaagaactccaggttcaacaatgaaaggtggtgttattttcagtcaagatagtaccattacagttttcctttcaaatgatacatcattagattcatcaattgataattctaatttatctacatggatttcatcattaactgaacaaggtaaagaagaaaatgcaactttatcttcaatttcaattgctccaccaactattacagcacaggcatcagaatcagctactgtttcatcaatttcttcaacatctcatagaaatgatgcagctgcaattgttccaaattcatttatgggtactttattaaactcagttgtttatgttattttaagtgctctctacatttaaacttaaatatagaatatagaatataaaattagaatatagaattagaattaactaattattatcattatcactatttatatatcccaggatgattttcctactttatcatacatactggtttcaaattaaaatatcttaaatataccaaaaatcatttttcactggcatacaaacaaattatttaccaaactttctttctttcctttctttcttttacttgattacctcatagatggtgtctttcattttgagtcatatatagttctctataacaatttataatcttaaacactctttaggcattggctatttatagtagtactaacctacaagataattacacaccagcgacgcgactatgcattttacgaacttttaaaatttggacgtaaatattgaattagatcaaaccaatgtcaaaagtctggatcttttaatttaactaattaaacttcaaatatattcattattcaataaataatcatgtcaaaccaatggagtgttgatcctgatacacgtaggaaacttttagcattacaaaagcaaccaaccaataaaaaatgttttgattgtaatgcaccaaatccacaatgggcatcaccaaaatttggtattttcatttgcttagaatgtgcaggtattcatcgtggtttaggtgttcatatttcatttgttagatcaattacaatggatcaattcaaacctgaagaattgaaaagaatggaaattggtggtaatgagaattgtggtgaatattttacatctcatggaattgatttatcattacctgcaagtaaaaaatataataattatgttgcagaagattataaatctaaattaacagctgctgttaatgatgaacagtggactgaaccagatcattctaatgatgagttattcccatcaaatgaaaacagtaataacaacaataataatagcaataatgtttctaatataagcagtaaaaacaatagtacttcaaactttaaatcatcacaaaaggaagcaaatgaacaatattttgcaaaacttggtaatcttaatgattctagaccagcagatttaccaccatcaaagggtggtaaatatcaaggttttggtagttcaccagcacctaatacaaataataataattcaaataacggaggtggatcattagcaggatttacattagaggcatttcaaagtgatccagttggtacattttctaaagggtggggattattttcatccactgttgctaaatctgttaaagatgttaatgaaaatcttattcaaccaggtgttaaacagttaggtgaacaagattatacaattcaagctaagagagcagttgaacaatttggacaaaaagttagtgaaactggtactgcattacaacaacaattttatgaagaatcaggtaataatggatatggacgtttatttgacggattgggtaatccacaagattctgatgatgttactgcaaaacctgcttttggaattcaaagacctgcaaaggagacaagtcttccaggactgggaaatactaaatttaacggttctaagaaagatgatgaagatgataaatgggataatttctaagttaagtatataattttttaaacctttttaattctataaaattgtctgaggtaaagctaatatcatgataataagaataaaataagattagcaagatttctttatcagtgtagcgctaatttccgcttttggaaaaatttcaaggaattggaaaatttcagtataaaaagtaaagaacttcccccgatgattagagtttatgagttggtgctgttattgacggtagtttctttacagtaaacaatcacattttaagaataatatgagtgcaactgaaacatctacatctaccacagttccaaccgaagttaaaccagcatcatctaaaggttatacagtcacctctcaaggtgctcataatatttcaatgggtaacccagttccacatcaaattcctaaatttgatgatccatacaaggagagagaatggattttagaacatatggcaggtgtttttagagtctttggtagaagaggttacaccgaaggttctgctggtcatatttctgtcagagatcctgttgaaccaaatactttctggatcaatccattaggtattcatttttcattattgaaggcatcagatatggtaagagttgatgaagaaggtaatcttgttggtggtaataccacagcaccaatcaatgccgcaggatttgcaattcattcagcattacataaggctagaccagatatcaatgctgcgtgtcatacacattctaaatacggtaagacttactctgcatttggtaaaccattagaaatgatcaatcaagatgtttgtactttatacaatactcactgtgtgtattcagattttggtggtgttgcaattgaaaaggaagaaggtgaagcaattgctaaagcagttggcgagaagaataaatgtgttatcttacaaaatcacgggttgttaactgcaggtcaaactgtcgatgaagcaggttacttgttcacattaatggaaaactcatgtgaagttcaattacttgctgatgcagcagctggtggtggtaaggaaaagcaaattattggtgatgctgaagctgcttatactgcttacatgaacggtgatccagaaaccttatacatggaattccaaaatgatcttgccttagaaaaacattatgatgattctttcatgacatttacaaaggcttcacaaaaagtataattcatttcttatcaaatgatttatttacttttaacgcttttgtacttttaacgcttttgctattattctttcctttatattctgagtatctaactgatcttttatacaacaccatgctataaacacagtattttttacaacaaatatacttaaagctaataaactcttaaagtaccaatataataagatgactttactaatatttcccaaaagggtatatgtgactgattaatctaagattgcggcactgataacaaaccgtggaaacaatttatttaaatagcttactttgctaccgagaacaatttatcaactctgtaatatctcgtaaggcaaaatgactgagattcaaactactattaacacaatgaatgtcccagagaaagttgaagttgcttcaactaagggttataaattgagtaaatcaggtgttgacaccttatctttcggtaacgcaaatccacatcaaattcctaaatttgatgatccatataaagaaagggaatggatattagagcatttggcaggtgctttcagagtctttggtagaagaggttacactgaaggttctgctggtcatatttccgttagagatcctgtcgaaccaaacactttctggatcaatccattaggtattcatttttcattattaaaggcatcagatatggttagagttgatgaagaaggtaacctggttggtggtaataccacagcaccaatcaatgcagcaggatttgcaattcactcatcgttacataaggctagaccagatatcaatgctgcgtgtcacacacattctaaatacggtaagacttactctgcattcggtaaaccattagaaatgatcaatcaagatgtctgtattattcataatcaacaagctgtttatagtgaatttggaggtgttgcaatcgaactcagtgaaggtgaagcaatcgctaaagcagccggtgataagagtagattagttattttacaaaaccatgggttattaactgcaggccaaacagttgatgaagcagcatatttattcacattacttgaaagatcatgtgaagttcaattacttgctgacgcagcagtaaatgcaggtaatataaaacaaatcatacctgaagctgaagctatttatactgcctcagttgaaggtgatccagctaaattatatttagattttcaaaatgatcttgcatatgaaattgcgatggataagtcttttatgacattttccaataaaccttgagttatgtatagtaaagtgttatatcgatatttaaataaaattcagtagatcgttaaaagaaaaagaaaccgtcatcgtagaaagtgaaaactgaaacgtctgaaaaatttcaacccatgtttcgaagtcatgttaacagaacaaaaagtcttcaagaattcttttttctggtaacacttgatctctaaagatgaacgaacaggatgagatatccaactatgtcttaaatatgagaaataatgatgtatttataccgagtgatatgtcgaattttcaacaaagtaatacaccagtaaactcaaacaaggtctacagtgcataccttatagttgatacgaattttttattaagtaatttatcattacttgatgatcttgagaaattattacatggtaaatatgcaggtgtgtatcaaataattataccaaaacaagttgttcatgaacttgatggtttaaaagattcaggtaaatctgttggaatttcatcacatcattcaatttcaagacttgcaagaaaggcaattgattggtgttattcacatttccatgaattagaaccaacagttacaggacagagattacatgaaagaattgatagggatgcaagtaaggataattctattttagattgttgcttatatttccaaaatgttgaaaacggaggtggcaatatggtcgtgctgttatcaaatgataaaaatttatgtgttaaggcattggtcaacaatatattaacaatcagctctagaccagaaatgacagcagatttgattgctagtaatatattaagtgaattacaacaacatcgggcgtttcaactagagcaaaatgttaataattattctaataactatcaacaagaattcaataattataataatattcaagaacagaataattataatcaaaacaattacaataacaataatggtttcaataatgttcaaaataattattacgataatagttttcaaatggaagataatgagaatgcaatggatttagagatggatttaaacaatgagaataaaacgacacagacacaacaacaaactccacgtttaaatgatattaaaagtgtatcacttgaaataaaccatcaagtaaccaaattagttttagaagctataaattttgcagttgtatcaatatatggtgatgatgtaggactaattgattatgatgagaatagaatgcataaccttgatgatgcagctaaatgtatagttagattaggattttccacatttgcagatttctttgatagaagaggattcaatccaatgaaaatattagaaaataggaaacaaagagacgatcttgtatttttatcaaataatattcatgatttaaaggattttgttacattttggagtgattttcttgatggaatttataaaaaaagaaatttaaaacaacaaaatgcattgaaacaaatctgtaaatggtgggataccagaatcaatgagattgaatgatttaggaaagttcagcttgtgttttgttttctctgacgtctcaaaagcccttgaaatttccgcttctttgtagaaggttccagttgtgattgtgatggtgattctgattgtgataaagtagggattccaaaagattcagttactggatgatttttggatttagaatttattgcattccaatatttttcgaaatcagtattataaagtaatgtttgattacttgcatcgagagaatttatagaatcaagaatcactgactccgttgtagttgataaatgttttaacattgttttattaacgaataattgtcgtatacaatcactcctgtatatttcatccttagataaattactattcgaaatagttgatttataataataagcattggataattcatttattattagatttttacaatctaattcatttaggagtttcccattaatttgtgattgaagttgggtgaatttcaaagtttgattgtttattagttttaacgcagataattcatcttctattggggaagtctctagaggaagtgtatacttaaattcattataaaataaggtaatttgatctaaatcttcatttagttcaatcattttatcctttttattaatgattggtttgaaacttgattgtatttgtatgaatttctcatagattgaatcaattatcgtataatcatcattagataacttatttatatcaaatgttttactcatgaattcatcatttgtttgagaagtatattgcttacaataatttacagtatctgtaactataattttcaatttggtcttttctttagtgtcataatttattattagatatccaacattatgtttatctattgaaaaaggttgatacatgagcagttagagagagagctgaacagtgaattatacatgttgatgatttactatgggaaattgaatttctcatttttgacatttttttcagctgttaacatgaaaagaaaaaaaatttcatttttaaaaataattttgattttattttatctttatacacttttcactttaagcaacaggtatttataacacagcataatatgttaagaaagcaagctcgtgaacgtcgtgaatatttattcaggaaagcacaacaattacgtgaacaaaatactatagctaagagacaacaattatcagcagcattagcaagcggtaaaccattatcaaaggaagttgcagatgataaaaaattacaaaaagattttatctatgatgaatcattacaaaaatccaatgaagaattagatgatgaatattctgcattatctggattaatagaacccagaattataattacaacgtcaagaaacccatcaactagattatcacaatttacaaaagaaattaaattattattcccaaatgctgttagacttaatcgtggtaattatgttatgccaacattaattgatacctgtaaaaaatcaggaataacggatgtaattgtattacatgaacacagaggtgtaccaacaacaatgacaataactcatttaccacatggaccaacagttacatttacattacataatgtaattttaagacatgatttattaaatgttacaaatcaaagtgaagtttatccacatttaatatttgaaaattttagtagtaaattaggtgaaagatgttcaacaattttaaaacatttattcccaccaggtgttaaaattgatagtccaagagttattagttttataaatcgtgaagattttattagtgttagacaacatatttatgcaaagacaagagatggagtagaattaagtgaagttggacctagatttgaaatgagattatttgaaattagattaggtacaatggatgataaagatgcagatgttgaatggatgttaagaagatttgttagaactggtaatagaaaaaattatttaagcaatgaataaataatatattgaaaattcatattatataatttctttatgtaatttagtaagaactattatagtaaataattaaagaaataaataacaaaaaaatttataaaacatatgaacaaaggataaaaatacaatacacatgtgtgtagataatagataaacgcaaaaaatgaaaagaacagatttaaggaaagagaatagaaaaaaaaaatgagaaaatcaagcataataaatagtgtattttaaataaatttattgatttaaatgagtgaaatattaatgagtaggtttatattgtgcaatgggtaaatttgttttatttaataattaattattctgtaactaaactgagagttttaaaacttttgatactttcatcatctgaaggtcttgaacattgaggagagatatcttttgaatctaaattattaggatgtctattatttgaatcatttgaacaatttatcttttgttttaaattttgacagtttgaacttgatacagaatttgcagttgaaggtggtgtattgatattgtttaaaattgtattcttctttaaaatattatcaatatttgatgaagattttgaaaaattgttattattattattattattattattattattattattattattattattattattagtattattgttgttattgttgttattggataatacttttgatgaataagtatttagagatctacctgaaaatcctgcaattgattttcttggagtatttgacattgtgaaaacattagaattttcaaaatcattattttgttcatcataagttggtatattatttgatgaaacattataattaattgaaggagaaggtcttctaatatttgagaatgaattagttctaatatttttattagtgaaagggttattgttattaatagatgttggagatcttggagaattacttgtattaatattaatatcaatttgagaattcattgaattagttctaactaatttttgatttgatagagacattgaaattgaaggtcttctaattgaaaattttgattcatgatcatcttgagcaattatatcagcataagaacaaaaagatttatttttcatcattggacttgcagaagtaagaggatttctttgatttgagattgaagttgataatggatcatttgttgaagtatttgttaaaggaggtaaagttgaattatatgattgagaatgagctaaaggttgattttgaggagtttgtgataatgaagtagatgattgattttgtaattgttgagttaaatttgagaaacttgtatttgtatttgatcttgataaattatttgaattattattaaatctataagaatttaaactaaatgatggtgattgtaaatttgatgatgaaggtcttcttgatgaattacttaaagcagcttctaaattagccaatgatgaacgtcttgaatgattactaaaacctaaatccggttgatcaaagaaattattttcatcttgcatagtattatcatttatagtatttaaagtgacactattaagcatactagtattattagtattattattattattattattattatcattaagttcgaaattcttcaacatatgagtagttgtatctaaggaagcaggaatgaaagtttcagcagatatatgacgaggtaaagaatgtggtattaattgagcatcagttaaaggatcttgaactaaacgttcaaagataagtgaattatcagcttttgaagtataacttgaacgggagatagttgaggatagagagtattgatcattatcttgattaggggtgttgagattcattgtatatggatatagaatgagaaaggataaataggataaattacgataatccaagataatccaagatataaattaagattaatcaattatatcagtgatcaataagcaattaacaagagagcaaccaggggggaagccatagtccatagcttagaggattcgcgacattttttttgattggacaaattaattggttacgtaatgtttattatatttgattttattagctaatatacagttattattattatgaaaagattattattatatagggtattgcttatgcagtagcagaggaagtgtatttagtgactgctctggtaccttcagagactgcatgtttggataattcacctggtaaaattaatctaacagcagtttgaatttctcttgctgaaattgtagattttttattatatgcagctaatttagatgcttctgatgcaattctttcgaaaatatcattaacaaatgaattcataattgacattgccttttgagaaatacctgtatctggatgtgtttgttttaaaactttataaatatatgatgaataagtttcctttctagttttagttctcttctttgcatcagttgatgctgcagtcttcttacctgctggtttcttttctgctggagctttagatgcaactgtctttggtgccattgttatatatgtctaaggtaaataatttattttactaaaagaagaagttttagcaaaagaaatattcctttatcccaaatcaaattatgggatacataccaggggtatttatactttaaaataaataaggagggtggctcatctatcaagactattttattgtgaaaaagggcggtataaaatttcgcacttttaagtgtaaattttagaactcttttaaatatagtaaattaatttaaaaaaattgatttaacatgttttaaacttcgcacttcatagtaaatgtaatcacttttattatactattgatctattgacattgactttgatcccccatatgatgatttcaattattatataaataatgctgtacttcccctctattcatgttatagtttaatcttttattttcctttatactatccctacacaaacaaactacaaataaataaataatgtccggtggtaaaggtggtaaagcaggttcctctgaaaaaacttcaacttcaagatcttctaaggctggtttaactttcccagttggtagagttcacagattattaagaaaaggtaattacgctcaaagagttggttctggtgctccagtttatcttactgctgtccttgaatatttagctgcagaaattttagaattagcaggtaatgcagcaagagataataaaaaatcaagaattattccaagacatttacaattagcaattagaaatgatgaagaattaaataaattattaggtcatgtcactattgctcaaggtggtgtcttaccaaatattcatcaatctttattaccaaagaaaactgcaaaggcaaaggcttctcaagaattataattccattttctagtctagtcttatttcttttctcttttctttcttctctttatgtatattagttagtttttatattatattaaatttataataaatggcatgtttttttttaaaattacaaaatatcactataatttacaaatatcaattcctttgagaatataaatcaactattatattaattaatgaaactaaaacttcagctccaattaataatataactgtaacttctaattgttcatcattattatgtccaagttgttcctttaacatttgtaataaatcactaataatttctaatctttgatttaataatgcaactctttgattaatttctaaatatcctctagttgcttgataaattggttctaattcaggttctgaccacataagttcaggtgaatctaatattgatccatgtaaattaatatttattcgtaaaataaataattctccaatacttttcataatttcttcccttgtcatcttaactttaccagtttgtgaaatttgttgtggtatatcttgtgtatcctcaatcgtattatcaactaactcttcaaataatgatatcttaacactttgtgatatagcatatgatatacttaattttaacatatgattagaatcatcccttaatgtaataaaatcattataaattcttggttgataactttgtgtaatataataattaaattcttccttttgaacatcttcatctgctaatttctcattctcaaacttagctaattcataaaggaatatactctcctctcttttagtaaacccccacataactataactccatattcaaatatgaaaatatcactatttcttttacctaaatcaataactccaccttcatcatcaaattgaatcgctgtctttttattactatttccattactacttcgtttaccttcatcattagaattcccatcctcaattgattcattgcttctttgacttgatgaactattcttcctaatatttcgaaatttgaatggtgtataaatacattcatcaaataatttaggtgctgtagaatgtgtcctcctcttatccttcaaccatctaataaaatctctcattttatatgaaccagctgtacaatatgttgtaactctaggtaacattgatctatgtttcttacctaatctctctgcatctttccttgcattacgatccttaattttttgtaatgaatattgtttcaatgctgctgccttattcgtactattctttacttcttcatctccttctattgattcataatctaatgattcaggtaataatttaagtttttgtatcactcttgaagatcgttgtggtgtcatattaggtcctaaacctttcgttgttattgactttgaagtacctgagcttgtggctgatgtggttgttgttccatttaccggtgtatttgaattagattcagtattagaatttacattggaacttgtattggaactcacttgacttgctgtattagtccttcttttcagttcattttcaaatacctcaggtgtttgataaggattttccgtaatcaacggggttgtctctgatttgctactcattctctaccagcaatgattcccttttcagttccttaatgtatatacggaacacccttggcgaagtagaagactaatcctatatcaaagaattacatcacctttaacaagcaacccccagtcgatcgtcttttcatgataatttttttttctttgtttcccaaataggtaacttttgctaaataattttcatgtcaaattttaaaattttttttccttagagatcactaatttctaagatttttgttaaaactttaacatattttacctagtaaagacacctaatacatccaatatggtgaagaaaacagcaaagactgcatcttctagaaaatggtcgtataaatcttttagagatttggtggattccattaaaattgaccctttgaaagatattaaaagaaaagcattctatgatgctgaaatttcacattttttatcaactttagaacattggagggaagttaatttatctaaaaattttccaagaactagttgaaattgtggaacctatttccatgagtttacctcaattaatttatcataaaaaaactatttttgaagctttagataaaacacttattttaaatgataacttatcattacaaccaacattagaattattatcacaatttgttcatgatttaggtcctgacttcatggaattctatcttcgtgctttagaaattattagagaaatagcattgaattcaaaagatcctcaatctttagaattaatcttcaattgcttagcttatattttcaaatacttatcaaaaattttatcatctgatttaattccaacttttaattctcttttaccattattaactgttaaaaataaagattatgttactagatttgtttctgaagctatttcatttttaattagaaaatcaaaattatcatcattacaatcatttatcaatgatatattcaattctcctgctttactaaataatgaagaaaataactgatagttatcatcttgctttaacgactatgtttacagagtcattgaaaagtgcctcaggtgtaatgcattccaaaaccggtatcatcttaccatcacttataaaaacttgtttgaaaaatcctaaattcacttcagttttatcagatataattatggatttattagattatacagaaacaaaggaaaactcttcattattatatacaactactcaaactgctgtaagaaaagaactatcggaaccatctaatattaattacgttttcctaactaatgtttcacaagttttacttacattatcatttgctcaatcaggtagacgtgttgttgattggtctgatcttttaaattttgtccaaatattatatgattacttcattaactattaaaagtgatgaagacatggaagaagataaagaagatgaagaagaaggagaggaagctgcaaataaagaaattgagtctattaatacagttaaccataaattagatttcacaaattcatttgcatcttggtgttcagttttaatgagaaattgcgaaatacaagcactaactaaaaatcatcttaatattataagagttatgtcaaacttagatgatggatcagtatttttacttttcattgatgcagcaactgatttaaataaggacagaactgtacaatttgttaaaacatcagttactaaattcataagtcaaaattggaaaggataattataaagaaaccgcatatttcttatctaaaatgaatagtaaagatttaatcgctaaaactaatgatgattcaaataaattcaatataattattccaactgattttaaaaacttcatcttaaagtcctttaaaaatattcaatccatagagaataaaaacgctttgataaacaactattggagattactcattttacaattttgtgatatatcctttgatccagatttattaattaaattcttgaatcttttacatgaaagtaaaacagactccgattttttcagtttagatgtctatggtgctacagttggtgcattaacaaagcaagaattatcagataatcacattcatgaaatattaacattatcatttcaaaatctcgaaactctttcaggcagtagtttatttgtacaaaatttagaaaaaataatttcaaatattaaagtttcaactaatactaaatctattgaatttattaaaaaagaaaaagctaaaactatcttatcattatcaaaaattctaaaatctccttctcacgaatcaagagaatgcgctttaactttgatcatttcaatttttaataaatcaggggatgaaattccagatgttgttttgaaatgtcgtactattgaacaaatcccattaaccttacaatatgccagagatgttcctttaagattcagaaatttagcccaggattattcaaatcaatcaccattaattaacaatattgtttgtaatttcttatttggtcaattatctaataaattttcaccatcatggcaaggagttcaagattttgccgtctctacaatcaatcaagtttcagatttaatgtgggaattagctttagaattcatttcattaaattatcaaaatttaactgaaacttcatatctcgattatgagtttgatcaatttgatgttaaatcagatattactaactggttaccacaagattcaagattacatactattcttactaactttgaagaaacaatttaccacaaatatgaaaatgttaattattcaattattgaatttactgaatcaaaaagaaaatctttattacccactgattttgtcagatatcaagttattaaattattaaataaaatcccacaaattgctgaatctaacttcaatgatttagttccattcttagtcaatgatgatgctgatgatgtaggcgatgcccaaaaaggttcattattacaaggttggacaatgaccgatagaaatggattaattgaattattggctaaatttaaaaacttaccaaaagttccatcaattgaaaaagttaaagaattgttactcactttactaatggacagacaaattgaaatccaaaagttagcattaagttgtgtattgaatttacataatccagttttcaataaataccaaaaacatttgaacaatttactagatgataccctttttagagatgaaattgttatatttttacaaaataatgaaaaaaatgttattgaagctaatgatatgcctgttttaatgccattggttttacgaattttatttggtagagctcagactgttaaaacaaatagtaccaaggctggaagaaaaattgctgctataaaatctttgaacaatcttgcagataattatgtcatccaatttttagagttaacctatggcagattcaattttgataaatttaatgattcaaatggcgttgttgaaaagaatgatgttaatagaaaattattaaaacatataaatggttttatcaacttgaatttggaagttactgatactttaggtagaaatcatagacaatgtttatctgtcttagtaaatccattaatttactctttatctattgctgaatatgctattgagaacaaagaagaatatactgaagattcaattattgaaaagtctgcccgtaatgcaagaaaatcaggttttaaattattatatcaaataatgcaatacttaggtgaagattacaattgggaaattactggtgatttgatttacaacaatcttgttaaatctaaaatggataaatttgctgaagaaaacttaagtggtgcatcttcactaatgaaaattatgactaagctatggtgtgttccaagtagattatttttcttatacatggatgattataaaccaattaaagcattattatcgattttacctaatccaaatgcaaaagatactgttttagttctgattttagaattcattattgcgttacttaatttaccagccaaagatgataaagtcattgaattgttaaccattgttatttctgattgtttagattcattagttttgatttttgaaaatagtaccaataataatgttaattcattagctgtccaagttttactcttgtttgtttcaaatgattatgttactgataatgaaaatagaaaggtattaattgaatccttaactaaagcattagagaaacctactactcaaattgaaacctctgttaaaattgatattgttagaatgattgcaattttagttgaagattatgaatgttcatacaatgaaattattccaatttattctaatgtttccaagttgtatagtacatgtgaaggttcagatatgagaaatgttgtttcaaccgttttctatggtgttagtaatagatttagtgagcttgaaaaagtttgtcaacttgtcattgacttaaatgcatatgattctaaaaagttcagagaacctgattacaatagaaggttacaagctttcagtgatttgaatgaaactgaatatttgaaattatcaacaattgagtggattccagttttatatacttgttgttttttcattaatgatgaaaatgatcaatcgttaagatcatctgctggttatacatttcaaaggtatattgatgctatgaatgaattatctgaatctgatgctgctgaattagtgtcacaatttcaagaactgattatcccagctataagatctggtttgagaaaaaagaatgaacttgttagaggtgaatatgtccgtgttttcaatcatattgttaaaaatatcaaatactatcatgaatttgatgatatgaaagtgttgttgaaatatgaagaagaagatgaagaaagtgacttttttgaagatattattcatttacaaacttataaaagacaaagatcattaagagctattgcgaaattagctcataatctttcatccaatagtattgcacattatattttgcctattattgaacattatgcattttggaccgatgaaaaatatagaaatgttgccaatgaaactatcactgcatttaaaagaattattcaatacgtatcatggaatcaattcagagcaattatgactagatatattaatattatgaatacttcacaagctaagaataaacctgaaaagttaagagattctattctattaattgtctcaatggcttctgcaatgagatcatgggttagtgaacctgaaacaaaaccatctgattatcctaaaattgagaaagttgatcaatatgtcacaaaagatttaattccaaaacttcaaaagattatgtctgttaaaaatgaagatactgttgttattagagttccagtttcggaagcaatgatttcattaattacatgttgttcacaagaaaagatcgatactgaacttgctggtttattaactagtatttgccaaatcttaagagcaagatccgaaaacttaagagattcggttagaaaacatttaggtagaattgcaatatttttaggtccaaactatttgaagttcattattaaagaattgaaaggtgcattaacaagaggtccacaaattcacattttaagtttcactatccatcatattctcacaattatgagtccatatttagatcatggttcattaggtgattcagttgctatgattatgcaatccattatgaatgatatttttggtgaagcttcagaagaaaaagaagcaactggttatagtaacaaagccaaggaaattaaacataacaaaagttttgatactggtgaattaattgccgcaaatatttatttaaaagatttcaatcatttattaactcccgtcagatatttacttaacgaaagattatcattcaagtctcaagcaaaattagaacaattaatgaaaagatttgctcatggtttaaatagaaacgaagaaggttcatcaaccgatattttaattttatgtaatgaaattttcaaacaagctgatgaaatagttgaagctaagagaaatcaaaaggtcaagaaagtagatgaaaaagttgagagattcttagttcaattagatgctagagctcaaaaaactcaaaatgaatattcattatatgttactacattacagcaattttcatttgatttattaaaaactgcaatttctaaacatgatacattatttaaggcatcttatttagaaccatttgttccaatcttacaatcatgtttatcatcagatgatgaaggtgttgttatttcatctttaaaagttttaactatgctggtcagattagaattcaaaccagaaactgatagtaaatttactgaagcagcaaacgacagtttaaaaattattcaagatatgccttcaaccaataatgaaatttgtcaaaattgtttgagattcctcagtaatgttataagattcaagaatgatttagaattacaagattctgctattagttttattttgaaaaaagttgagcctgatttagattccccagaaagacaaggtactgcctttggtttcttaaaaagtattatgtttaagcacattatgattccggaaatttatgattgtatggatgttgtctccaagttaatggttactagtacaactaacgaaattagacaagttgcaagaagtgttttctatagtttcctaatggaatatgatcaaagtagaggtagattagagaaacaatttaaacttatcatcaataatttgaaatatcctgcacaagctggtagattatctgtcatggaattaatgttaacttttgttaagaaggcatctaaagatttactttctaaattaacagtttctttttttattgcattagcaaatgtttctgtcactgatgataatccaagttgtagagaaagtgctactttaattttggaggcattatttgtcagattgaatgagaatgatagtgatatggaatttgtttacaaatatactactgcatggttaagtcaaaacaaaaaacctttattagtcagatgtggtttaaatgtttacaaaattttttttagttcaattggttttggaatcaatagcggattagatgatttggttttggaaattattaatagaacattaaaatccggtcaaagagtagatgataatgatgtagaagacgaagatgaaaatgatacgccagcttctgaatggcaaatgatttattcctgtttaagtgcttttgaaaccatttcggctaagacaggtgtatttacatctaaatatgaggaaacttggagctatattattgcaactttgttatatcctcattcatggatcagactatcagcttcgagattagtttccaaattgttaaaagaacaaaatgttgaatttgaagttgatgatttcactattcaaacaattgcatatagaacatttagacaattgggtgcaccaaatatttctgaaaatcttgcaaagcagagtgttgaaaacttggttgaaatatccaaatattgggattctaatcaaacaaagtttatttcattcagtaaggaagaagttaaagcagatgaaactaaaagacaaacttttaataactctttgattgggcattaaatagatgtgcagctatattgaaaaatgattcaagagattataaacaattacttgttactaagaaggctattatttcatattgtgaatttttaaccacattcttaagtgttgaaaaaatgaaggaagtgttatctgagacattaatgattccattattacatatatctgaaactgaaattgaagaaaatgaaaatgaggagaatgcattaccaacattagctactgaatgtttgagcaaattatccaaaaagattggtatttcggattacaatattcttttatcgaatgctatgaaaattattcaagaaagaagatttgaaagaaaaactaagagagcacaattagcattgaataaaccggatgttgcagctaggaagaaattagtgaaacatgctaaatttagagagaagagaagagacaataaggatgaaaacggttattataaaccaaagagaagaaagatgtaaaatttcttcattatgtaaattaaaatagtttttatataagcaaactgtaaataataattaataattaaaattataatatttttgatacaacgaacagctaattaaaagctataaaatagagtaagtttggtattttatggattgcagattagtttgcatcatccgctaaaatagctggttctgatttcagtacttgtgatccttcatcttcaacattatcttcaatattattatcctgtggttgatcggtgacatcagtgtttggattttcatcattttcaacatcattatcatcctcattgtccacatcatctaaaacatcgttaacatcatcatcgtaaacaatttcagaattaggttccgtatttggaccttcactatctggtatatcattatcagtttgatcaaacgaaagtacactattttcacgatcataaataccattttctttcgtaatatcatcaccaatatcatcttcaagatcatcgtcattttcttcatctacattaaccagtgaatccttagctgcatcaattatagaatcaatttgtgaagtttcgccgtcagatgcagcactaagtatattttcaggttcaactgatgatgctatatcatcattaccaccaacagaagattttaattcttccattgtagctaaacgttccttttcctttaaatctgcaaaaacttcataagctttttgatatctttctttatccttttcgtacataataaaataaggtcttttttcagcttctttcatatttctccaaacttcagtcattgcctttgataaatctaaatgttcatttggatgattttgagcccattcagctttaattgattctctctgtgattcacaaaagaaaagatatgcatttgttggtcttttaggttctcttggatctctaactttcttctttgcgggtggattatttgctatagttgaaacaactcgtttcctacgatttcttccagttgaagtagtaggttcatttgatgagattgaatctatatattgttgttgtctttgagatattaaatcacctaattcattaggtaataattttttaatatttgataattcaagtggagttttagctaaaagagttgataaatcatccaatgttaaagattgaacagaatctgcattaatatcagttggtttaacttttttcaaatcagggaaaccaagagtagtacttttttgttcaataaattctaaaagcaaagaatattcgaatcttaatcttgaaattgaatcttttgctcttgaaacacctattgccctaatttgattttgagcttcaatatcaattatcttttgctttaaatctttacatttttgttttcaatcttaaagcttcagtttcaaatggcgttatttgtttataatttttagaattattaccatctttaaaaccatcatcaaattgtgaatcattttcaattgtttcatcccttagtgaatcttcagcaacctttttcaaatcagcgacattttcagactcatggacatgatccattgtatttggtaaaatatgtaccaagggagtttcttcagtcatttgtggatggttgaattagaaagagaaccaaacagaatacagttaaaaaaaaatagaaacattacactctaaataaataaattgatattcctttcctaacgtaaacctcattaatcaccataaatttaattattacaaaggcttaagacccttctctcatattgagaaatttttactatgtcgctctatattttctagtctgtataatttaatattcaagtaacggacttgcatttcgttgatgcatgtgtatataatattttaatctaattttttctattattgaatgcatattatatagatttattaaaaaatgatgaatacttacgaaacaggtaaattaatttcttccgtccatgagttatcaaatgaaattaatcgtgtacttctttcgaatagcgaagataaattacaactgatcactgaattaaacgatagaataagatgtttaacaaaagacgatacagaaacaaaagatgatacggaaacaaaagatgacacagaaacaaaagatgacacagaaacaaaagatgacacagaaacaaaagatgacacagaaacaaaagacgaaaactttgaaatagactggtgctctcatgagtttgttctctatgatgctgatctaaccaactttttatcgatctgtgatcgattcaggcatataagttctcatgaaaacatattcgtcagaagggtatcttatgattctttccgctcatacatgactgtttgtctacaattgtacgctacacgaagtctttatgaattccgtagatatacaggacaaaccatctcaagcctttatttgcttagacgatgactgttctgtagttttagtccctaattattttaaagatatattcaaggaaatttgtaggccaatgcatctccgtgacacctgtgtacattccacgatttgagtatgatgctcaggttgcttttcatgaccaaattgatcttaaattagaacaacataagtcagttgatgtaatttatatatgccattagtgagatatcaggcaaggactcattgtttaatttgagtattgaagatacaaaagttgctcctcttgcatttgatgcaacgagaatagctcattagcatggaaagagaaagccattatgacctatatacgtgttatttacatactttatataccctttaaattactctatagaccttcaaaacgacgaataccgtgtcctggatcttgtttcttaggtttcttatctttctttttaccctttttacctttattatcaattgtatctactgggttctctatctctgcaataatcttatctcttatagtatgtaattcaacagttttacccttattttgactaaaatctgtttcatcatcactatctggaacttcttcaccaatatcactatctgctgtatctacatcggattcttgttgagttgtttcaactttttgttttttagatacagctgctttacttgcttccatacgacgttttaatgatacagataatgatctctttgtagctttcattgctctatcatcgtcttcttcttcaatatcttcttctctgttttcatcctcatcctcatcttgttcatcttcatcttcactatcttcatcttctgctttcttcttacttccatttttcttagaatcagttttcaattcaacatcagagtctgaatcatctcctgaatctgaaccatttttataatcatcagaatcacttctctcatcgaaattatcgtcatcctcttcttcatttctattttgaaccattgattcatcttcccaaattttaaatccatcagtaccaaaactaactaatctatattgatgatctaaatctaatcctaaaacttcatcaactttatcatcctcttcaggatcatgttgtaaaaatctttccacaactttaccaccaattatatcaattttagcaatatgaccatttgaacaaccaccataaacatatcttgaatctggatccattgcacttactaaactttcaacagtttcaccctttgcaactctaattctactaatttgatcttcccattcattcatttgaggtttccaagttgttacaacatctcccataccacaaatcattgtttcttgtttctcttgatcaagccatgttgcacataaaacttcatcttcttgatcttcacttgtatgtaatggttcactaggttttcttaaatcaatttcacaaacagttgtactaccagttgttataattttataatcactctttggccaacaataattaattgaattaataccttctgccatatgtaattttttggatggtttataacataaacctaaatttttcaatcttgtatcatgacatgttaaattaccactttcatcaccaactaataaaaaatttttatttggtacacttaaacattttgtgaaaatacttagttcataattattattatcaaatttacaatcagttttggaattaaatttatttgtaactaagcctgttttaatatcagcagttttaatcataccatcagaaccaattgaatgaaccttttcaccacctgatggtaaatcaaagcaaatatcacgacaagattttttatgtctctttgtatgccattgggaaataattgaattatcatcaaaatcatcgtacttaacacaacttatatcataaggaaatttatcttgatcttcataaatttcaattaatttttcataatcatatctataagtttgaacatgaccagttgctgtacctgtaatgaaaattggttcgcttggatgacattttgctgcaaataatggatctgcttgatgatgaatattgaaaattggtttccttgtaaacacaaattctttacctgtatttttactactttttttaaccattttgatgtctattgatggacaattaattcaacttgataaccattaattgtaatcaaattgaaaaaaatttgaaaaatttaattttttttaagttgcttaattaggaaactaacgatattcccatagttaagaaaatgaaaaattaatgcgatggaaattatgaatctagctttgatatcttgcacatcacagaatataatgatcaatgtccctactagtagtaatgctgtatcatagtggaaattctttacaaaaaaaaagtcaacctatacctgttgtcctttctagatctactactatatcctctcaattgataaataataattaaaagattttaaaaagtacacatcacgtgacaaagtgcaaagacacgtgacacaactgtggcgccttcctaattaagcatttatttaagcatcttacccaatgtaacctaacataaaattgctataataatcatcaaattgaattattattttataacggatcacttttaacaatagaaggactttgaatggataacttcaactcattcagtgattagttaattgatatattgtagaatttattttggtaaacattagtaaatgtttttctttcctaactcttttttttgaagcaaagaaaactatatagacaataaaaatggcaactaatatcacatggcatcataatttaactcatgaagagcgttcaaagcttgttaaacaaaatggtgcaactctttggtttacaggtttaagtgcatcaggtaaaagtacaattgcttgtgcattagagagaaaattattagaaactaatattcaaagttatagacttgatggtgataatgttagatttggtttaaataaagatttaggatttactgaacatgatagaaatgaaaatattagaagaatttcagaagttgcaaaattatttgcagattcttgtgttattgctttaacttcatttatttcaccttataagaaagatagagatgaagcaagaaaattacataatgaatcaaatttaccatttattgaagtttatgttgatgtaccattatcagttgcagaagaaagagatccaaaaggtctttataaaaaggcaagacaaggtcttattaaaaattttactggtattgatgatccttatgaagcacctgaaaagccagaaattcatattaatactcatgaacaatcagttgaagaatgtgttgataccattattgaatatttaaagaaggaaaaaattattaattaattataaataggtaattttagttctatatgtctacatgtatactcttgtaatatatataatattaatcgattcgaatgtaaaaagatgtatccattaattgatgtaacttgatacaactactactaaggggttaaaaaacggtgatattttttcttcaagggatggaaatatatcgattttacatcattttaaaactcagatcttttttattcctttaaatattgtatagatcagcacgttcgtaatgtttcatactccacctgttaaggcagattggacaactgaagtatcgatcaaacattcttatgatgttgcaaataatagttcattatcagatattgaaaatgatgaagatgatgataacaatagtcaatctgcaactttagatactaatgaaactaaagaatcaccaagtataaaaactgattctactgatcctaatgaaattggtgatattaaaaaatcagcaattgaagtacgagaagattttagtgaacttgatttccatattgaatcaaatagaaacaataatccatttttaaataatgatagtattaataatacaaataataatgatacaacaacagttacaacagggacaatgaatacaacgattaaaaataataataatgactcaatatctttttttgaagctacagaaatcccatctgaaggtgatttacctattgaacttcttaaggtttatgagaattttttaaaacaattaaaggaacctaaatttgaaagatcattagctagttttgaaattgctgaattatttcaaagattttatcaagattttcaattatcatgtaaagaatataataataaaattggtaaatatgaattaaagaatataacccaaagtaataataataataaaaataatgatgattctgaatatgaaaattttagatacaatttgattattgaaagaataatttgtgataagttttatagtcaagttgtttttccattgaagaatattgaaatcgatgaatttgagaaagattttagtgaaggaattcagtgataaattaggttgtttagggtctttacatataaatttccataatctagatattgatttccccgaaaacattgaaaaagattttttgaatgaaatagaggaaacattattgccagaatttgaactattaacagctgagagatcaccaacgttgaaaatgaagtatttaattaaaatacacgaatcaattgcaattatttttaataaaattattgaaaaatatgatagtaataatgttaatgaaaagattattcttaatactgatatttatttacctatattaatttattccataataaagttgaaggaattaagaaactatttcctcatacggcaattaagttttatgaaaagattctctaatgaatatattttcgataattcaatagaggcattacaaattgaaaggggtaaaatattatacgtatgtgcaaattttgaggcagcaatctcatatttatcaagtgttacattggagaatcttggactggatataccatcagatgatattaatcttttaccaggaagtatgagaacaagagaggaattaattgggttattaacagttccattaaagttggagagtattgaagataaaattgttgaatttaaaaaaactaatccattaatactaaataatgaaatagtttcaattaatagaggtcttatgggatttacattcaataattcactaaataatcttacaagtaatataactaataattttatcccaaatccattagttaatgcagatgaaggtattaaaagtataagtaaaacagttgattcaagtttgaaaaatattttaggtagagttccatggatgagtgatacaaatattgatacaataaaggagaatcttgcggaacctaaacttgatgatactgcaatgcaacaattaatggaaaatgaagcattctcaagttttgaaaataataaagagggtattataagtaagttcacaagtggagtaatgaaaagtttccaacaaccaccagaacctacaacgaatacaaatacgaatacgaatactagtaccaatactacagataatttaacgaatactggaacgacaccaatgaaatcttccagtggtaatattcgtagtcgtgcagcaagttttatgaacacatcattctttggatcaccgtcacatgataatggatcaactacaaattttggatcaggaacttcacttttaacaacacttgaacaagcatttatcaatactcccaatggaatcagtccatctcgattgagtaatagtagaaagaatacccttacacgattaccatcccaaggctatcaattaaaaccaattactaaaccatttgaagagatgtccatcagtgaactccgtgaaatgtacaactcttatcaagaggccactcattttaatcattgattatgtaatacatgtaatacatagtactatttataaaaataataagaaaaatacgcgaaaactgcagaaaattaaaatgtcactattgctatgtaaaattaccggcatcagagagaccacaacatgttgatttggaaatttaataaacattacagaacaattatatatagcattaactgtttttcagttttttgattttaattctaattcacttcataaactactcacaatgtatagaaggctgggtacacatgctgaaccatctattggtagtagtgggtcagctttaggtgtaatgaagaatatcttgaggaaggtttttttacaaataaagacatttagattagcaattataacaactttaatagtgttcacattttgtagtattttcattaataaaccaacattacaatttcaattagaagcattaaccaaccatccactttattatacttcatcactaaaatcagaaaataattcaactgattcattctttagtagattatataaagaatcaccgccaagattaaatactaaaaattttaaaacaatagagaatagattgaaatatttcttcccatttgatgaagatcaagttgttgaaaataatatttggcaattatggaaatatagagctgataatgaaaaattcccaaaaaaatgtttccaacatatggaaagatggagagttggaaattctgaatataatcataatttaattacatttgatgaagctgaacaacaaatttataatcatttccattatgatatgcctgaagttattgaagcttatatgaagttacctgatattagacttaaatttgatttcttaaaatatttagttatatttacaagtggtggtatttatgcagatattgatacattagatgcaaaacctttaagattttggtatcaatcaactttaaaaccaaataaaattatggttggtattaatgttgattataatgatattaattgggatatactttataatagaagattaacattttcaacaaaaatttttaaagcaaaatctcatcatccattcttagcaaaattaattgctagaattacttatacaagtttaaattatcaagaagaaattcaaaatattgattgggataaagcatttcaaaatgttgattcaaatgatgaacctttaattcaatttactggtgaatcaatatttactgatacattatttgattattttaatgaattaaataatccaattgttcatagagttgctagaactgataaagatttaatacctgaagaaattttcggtcctgaaacaactcaaatttttagttataaattatttacattagcaaaaggtccaactcaagttgatgatattgtaataatgccacaaattacttttaatggtccaagaactggtttccataaaggtgataataatgcagaatcttatgaaagtgaatatcaagataatcaagaagatggtttctattatgcaagatcattacatttcttaattgggattcattgattaatggttagtatcataagtttctaaaattaataatttaacatttttaaagtacaaaataaatttatataacatgttttttataaattaatcctaaaatttaattcaatacattaatattatgtaaatattagcaataaaaaaacactatttaagtgcaggattttgtctaataacttcttgtttaatcatccttacctcctttaatacactttcccacagtttatcagaattaattatatttgaatgatatgcaattgttgccttaatactattaccatcagcaactatatcatttaaaatttgtgcatattcttgcagtttattctcattaaggaaaaatacttcagcagtaacagctggattacctgcatagatggtattcattttaataattttaagtgttggacctaattttgctgataaaaccattctaatatcagtttcattaactgttgaatccagattctctatacgtaaaaatggaattaatgatgcatttttaaaagttaaattatttgcctgtgatcttgatggtgcattattagatgtatgtattggtgcttgttgtggtacacgttgttgtggttgtatatttgttgaattttgttgtgtatttcgtgttgttgtatttctaccttggtttctgttacgattatcattattacgattagtgttagaacttaaattagaagttgagttagattttatatcatttctcctatcatttctcttagctgcctttggtgctggacctgaaggcagtcgtcccagtcctaacgctactgctaatggattattctttgattcaatagatgaacttcccctagtactagtaggaattaattttttcttatcgtttctaagtggtattttttttctagtatccctagtcggaacaggactctctcttttagcaagacctaatcgtattgttaattcattaactttttcatttctgttggtacgtggacttgaattttttgaatcatgaacaccgtttaaagcttcaaataatgggtttcctttcaatccaccacgaccatctcttccacttactcttttaccagccctatgtctgtgtctatctctaccaccagccattgttcagttacgtatcaaagaacaatccctaacattaaaacaatacaaattttcatcaacagagaaccacccaaaacaaaaattaagaagtcttacataatcataagcgacaacatgaaatttcccaaagtgtttttgatctcaacagtgccattatcaagtaatttgaaacaacagtgtttctttatcttttggttctgttgtttacaatttgcatccacaacaatgcctctctgtggagctccccctaaagctagtatgtaatattatttttttcattgaaacaaattcaaatactaacaaattcctcatttattattacttacagttcaaagaaaaattgtcattttaggtgacggtgcttgtggtaaaacatcacttcttaacgttttcactcgaggatatttcccaaaagtttatgaaccaacagtttttgaaaactatattcatgatattttcattgatggtaaacaaattcaactttcattatgggatactgcaggtcaagaagagtttgataaattacgttcattatcatattctgatactcattgtattatactttgtttttcaatagattctcatgattcattagaaaatgttaaaaataaatgggtaggagaaattttagaacattgtgaaggtgttaaattaattttagttgcattaaaggcagatttaagacaatctgataatcaaattgatgattcaatgggtacctcagcttataataatgatggacaattaaaaaaattagtatcttatgaggaaggtgttgcaatggcaaagcaaatcggtgctttaagatatttagaatgttctgcaatgaaaaataggggcgttaaggaagttttcactgaagctgctagaatttctttaactgcttcacctgctgccgctacttctacttctaataataatgtttcctcaaatgatggaaataaatcaagttgtactataatgtaattattaaataaaataaaataaagtaaagtaaataaaataaagttaaaatgaactaaaataaaataataatcttgttaatctaatctcttttgtatgtatggtttgtatttatcaataataatttccgattattatataaagaatgatgctataaaactataaaaaaatgaaattttaatcttgtataaaacaagtgattaaagtccaatatctccccttgttgaacctctagttaggactattagtatctctaattaaacttttattaggaatttctgactggactatgtgatggacttcttgatgaatattgattatacattctataatctcttcttggacttggagatcttgaagaatgtgttgatctaatagttattgaattattttttggtatatcgtatgctaagttatttgaattttcatacattgaatgattttcaattttacaattattattattatcatttacattgatttcatttattttatcatttgattcatttagcattggtaattcacctgtttgaataaattcatcaagaatatgtgaacttatagttcttttatgtgatcttgttttattattaacactattaatagtaactgatgtcattgcttttgatggctcatcgagtgaataaaatgcagttgaattagtatctgttctacttcttgaagtttgagcatctgcataatttgaagaatctgtaattgcaggggtatttaccatactataaaatattggtgatccaaatccatcacccattttactttcctttccatcaggttgaaggtttggtggattagtaaaattaagttgtaatgttgaaccaattgaatctctttgtctatgattattcattgaaaattgggaaatcgtatcaagtgagtgaacacttttatttttataactatccattataggatttgtattaacaaatgaaacttcactggccataaatttatcactaaatggatttttgctatcattattatcattattttcaacaaattcataaactttatcaaaaggttcagttttctgtacttgtctcttagcgtgcagtttagttattacaactccaatgatgtagaataaaataagtccaaaaattactgggaatataatgatgtataaggtatccttcagaaagggtgaagtttgaagaaagggattttcctttgaattagggatctcaatcacaacagctttatattcaaccagatcatccggtgatgtagtttccattttttttcctatactaagaactacagaagaggtatgttataatggtttaagaactggaaatcaaattaattaagtgaatcaaagtaatgaacaaagtggaaaccctgtgtttacctttttcctatatgggtagtgttatgactttttgtgaaatatttaaaaatatctttgtgatttgtttttatttatctcttcaaagatgggatatatttactgtgtaatagtaagtactacctctacggtatatacgatatgatgtattaaaactaacaaataggcactcacgtatacactatagtaaaatagaatgtatatttacccccagcaaacactataaaagttgtagtagttactatggaaatcgcgggaatctttcaaattgtcaaagtttaagttgttcaaggtttatattcgagttgtgtatatattatttggatcttctattgatatcgattattagaattatagcatagaagtcgagatgtttaagacaaccttcaataaatgtcgtattccgcttgtcaaatctgtaagatgggcatctgtttcaaatgttagactcattcaatcaaagaaacttattgatgcagaaattaaagaaaaatatcgtgcacaattacttgcaagagcagctcagaaaggtttaaatagtcctgaagaattattagaggaaatgaaaccaactatcgaagaaactaaaaagcagttgaatatgattgatccgttaaaggaacttgaagattatgaacaagcattaaaattaaaggaatcacttaaaaaaaagaaagatattgatatttctaaacgtaaaattgatggttcaatacctgatgaaatcccatataaaacacttgattcatattttgttatggataagataaaagatttgaataaaccagaaattgaatttttatggagagctaaatttcaaaaagatgaacaatcattagctgctttaagtccatcaacaacatttaaaaaaatttatgaaaatgcacgtaaatatccaacatttgttttaccattaccaagaggtgaagaaattgatggtaaaaccccaatggaaatgcattttgttcaatggacatttgttggaccaaatacaactcattgtattataactactttagcagaatataaattacatgcagaatttgcacgtcctcatacaactttagctttccatagtgaattatcagaaactaaagatattgtattaatgcaaggtcatgttgatgaaaatggtggtgttggaatggatgaagctcaaatgttaatcttaaatattcaaagattttatggtggtttaaatactggatcaaagagtgaaagtgaaagattagaacttttgaaaaaatttaatacaggtgatgtaacattttcaatggatgaatgtgttcgtttatctcaaagttttgataactagctggtatcttcgtaatgtcatgtcatgtatataataattaaagtataataataatagattccccagaatacaagaatatgcattttaatacaataataaagtgaaataagacatacaaagcgcatttcctttcccattaattcaaattgtgtccgtaactatcaaaactgtaataaactactaataaaatacaatttgaacataataacttactttgatattacttgtttcataattaatactcttacgtaactggattaaagtttcaatactcaattcatcatcgattaataagcaagatctaataatccctatatagttaatagtatattaataaggttttgctaatattgataaagagggacatgcattcgtatattagatttctttgttagatgcatattaattgtctaaactaaaatggtgtaaagtagcatgtatgtaaactgtaagattatattaatgagataattcatagcacttttttcaagagtcaccatccatggatgataatatgattatattccttcgaagggataagatgaaaattgcttatcttggaccacctgggacatattctcatcaagctgcaatacaacaagatccaaatgctttacatgtacctcaatcaagtattggtgcatgtttcaaagctataaatgatggattagttgattatgcattagttccatttgaaaattcgacaaatggacaagttgttttcacttatgatttatttaaagaatggtacttgaataatgataaattaccatcattcaatgttgttgatgaacaatttgtctcaattcatcataatttaattacatttgcaaataaaattgtagatattacacatatttattcacatccacaggtttggactcaatgtcgtaaatttcttagtgctcatcaattagataatgtaatgaaagttcaatgtactgatacatcatcaacttcacatgcagttgaattagtagctaaacttgatgaatcggaaaggaaacattcagctgcaattgcttcatcaactgcaagtactgtacataatgtacccatattgaatcataatattgaagattcagttactaatactacaagattcctatgtttaggtaaaaagaaagaacttaaaggtccattattacatttacttgcatttacattgattaaacatgataaacatggttcattatgtgaagttttaaattgttttaatattcataatcttaatttacatacaataactacaagaccattgggcaattggaaatatgcattcttcgttgaagtttgggcaggaatcagatgaattggagaaatgtttaaatgatgtcaaagtttacaccgaacaactcgtagaaattggatctttcagaagaagtgaataaaattcgtctttttctttctgtatataaaatacatgattatgatactactgtgtaaatataactactaatacatctccatgaatactgtcataagatcatatgaccataaagattcaacaaaaataaaataacagattaacaccccactgcccaacaatgcacatgtgggaatgagagcggcggatataataattatgcctcttgttatttcttttatcttttttattctctttaattctcttcttttgatcttgtttcacaacaataatataaccaaatgcatccactattaaaccctttacatttgataagactaatacttcttgggatattctttttctccggtgcaattgcaattgttttcaatcaatttatgttcataatatggcacgccctcactaaatcatctccattgcaatcacaacttgaatacactaaaaaatcattcgttgtattacttacattctgtacaagtaatttcacatctcattcaactatttcactgtacattccgtgatgaagaactgatgaaaaattgtttatcaaagaacaatgatggtgaattaccacttttaaaatttgataattctgcaattattatatcaaatcatcaaatatactctgattggtttttcttgtggttcttagcttatttgaataatactgccagtcatttctttattgttatgaagaaatctttagaaaatataccaattttaggttatggtatgaaaaactataattttatctttttatctagaaattggcaaaatgatagactttatatggaatcacaatttcgtaaaatattaaaagttaatgaaaagttttggatgttgatattccctgaaggtactaatatgagtcataataatagaaataaatcacataaatttgcattagaatctaacttacctgttaataattgtgttttattacctcgtatcaaaggattatatgttgcttctaaaaatttattgaatgaaaactcaagtaagattttagattttacaattggttatacaggtaatacaaaggatataatggcacaggatgtacatacattatggaaaatctatattgaaggtatatcaccgaagaaaatttcaattttagttgatgaacatgagttgaatgcggtagtgcctgatattttcaataatgaacttaatgaagatgaacaaatgaaatcacttgagaagtggattgttaaaacatggagtatgaaagagaaagatatggcaaattattatgaaacaggtaaattcgatgtaccggagacacatacaattgagttcccactcagattacattcaaattgggaagttgtctcggtgtatggacctacactagctgttttagctgtggttatcggagttgtaaagctgatgtaatgattcatgtaatgtcactatataggaaaatgtactaaatttgcgagaagtgtttaaattttccgagatttttttttttttttgaattttctgtggttggacgaactgcttcaaatttgaagtactagaggtagtttacatgaaaagacttttcatagatatctgtttcaataactaatgtttgcactcatccgttcatatgtgcctgctctgcagacaccatttgtaagacaagcttctatgcttgcaagattaacaccaaccaaagattctaaaaatagagaaagaagattaggtcgtggaccgggttcaggacttggtaaaacatcaggacgtggtcaaaagggtcaaaaggcaagaggttcagttcctaattggtttgaaggtggtcaaactccattatggaaattattcccaaaaagaggtttttatagatttcaaaaattagatcttcatgaacttaaattatcaaaaattcaaaatttttatgaacaaggtagattatcatttttaaaggaaggtgaagtattagatatgaagaatatgaaaatagctggacttatcagtggatctatgaaggatggtgttgctattcttaatgatccattggttaaatatacattaaatcttaaaatagaatcaacaaaggcatcacaacctgctatcgaagcaattgaaaatgctggtggttcatatacttcagcatattatagtcgtggattaggttttagagcacatcattcaccaacttggtttttagaaaataagggtaaaattcctttacgtgctagaccagttgctagaagagatattgtattttattctgatccaaaacgtaatggttatttacaaaattctgaatatgttaataaaattacagttggtggttcaagaattgaaaaagctgtaaagaaaactgcacttaatttagaatttgaaaaagctcttgaaaatgatgttaaaccaccagttactgacagtaggattatctcatttgctgatcttaaactttaattaaattgaataacgttatatattatataaacactgatatataagtttacatgtaaatacaataaaaatatagtacaaaaattttacaagctctaatattatttattacctacatttaaaacaattaccatccccgtgaatgataatctaaactattttcatcttctaattcatcatgtaactttataactctttattttgttctgtgtaatattcgtataaattccatcatcattattgatatcttcaggttgctttcttttcttcttttgtagttctaattctaattcccattgcttttgtttttcctttttctgtaattcaattaattttctatcatttataccgggtatatcaattgatgatgttgaagttttaatacttgatgcatattcggatgcattatcattatttttattactactatcatgatttgatgtaaatttagcaatattatcccttgttaatgccaattttgtatgtgttagttcaaccctatttgttttatgaacattatattgatgtctttgaacatcttgaaatgttttaatatttttagttggtaaaaacatgtgcgttgaaagtgctgttggtaataaagttgctgcagtcattggtgcattagaacgatgatgagaatcataaggagttgaacttttattttcattatcattattaccctttgaattcttatccttacccatttcatcaagaaacaatccactaagtaaacttcttttgagtactggttttgtgatttcactatcctttttattaaacttaatcatatcatcttcctcttcttcttcatcggatgaaagtgatgaccagtcatcatcatcatcgtcatcaaaatcgtcgtcctcttcttcgtcttcttcgccattctttactctatttctactatcgccatctgatgaagatgatgaataaacaactacatgagtattagtttgaaataatgatgtttgagaagtttgagaagtttgcgatacagttgacagtaatgatgtttgagaagttgtttgttgcattggttgacttcgtttctgttttaatatttgagtattttcgtgagtatgtgtttgactttgtgatttaccatctctatctcgaagtaagggccgactgaataatgtcggaactaatgaatgtgttgtatgttgagcatgatgaaaatgattattaacatgaccattaatattatttttgatattttttttgccatttttcatttgatctgataatgataatgataatgaagtatcaattgaagacattggtggtgttgcagataaagcaggagaatctggtgatgattgatcaatatagaatctgggcttcctcaactgttgttgttgttgttgttgttgctgatggtgataattttgtggtgattttcgactattaattaatttatcttgcttcttagttggtggagtatttttaactttatccagttcctgaacaatttttctttgtaaatctaattgagttaattttgcattcttttcacgattctccttagatcggagtaattcagaacagattttaccagaagatatgtccttaattgtatgaatatctttacctgaaacagacttacctctttgagacaatctccatgaaatatttgctaatcttggattatgaaccaatggattatttgatttagctaaaactgaagctaaaataattacaggatcgggcccttcatttgattggaaaggttttttcccctcaacaagttcagacggtacctgtattaatgaaagggacattatttcaaggaagaagaggtatataatcgggaaagaaagtgtattttggggtcatgcataacaattacattttgaaacttttgacatgacaaggtttttccaccgggtttttttaatgctgcgtagatgatggattatgtcagcggtgtttttaggggatgttgtttctccgacagtatataatgattagggattggggtttatatacctggatattacaccccaatactatttataaatacagatagtgttattttgtctttatttattatcatcattaaatcaaagttatttaatgtggtaactctcatagtatttacacgattagcattattaaacttaaaacagtaataatatacagccgcgtaattttctattgtatacaacaattaaattgtcatgatggtttatagtgtaagtattaacctagttaatgtagtcttttaaaggagtttatagtaacattatgtagaaatattgattagagaagtctacaaagaacaaaagtctgtataagagccctgtataaagaagtttatttcataaaaaagcattttttagaaaaaagttgagcctcccaaaaatgaaaaatcaatgatttccaaggatatggagaaaggtttttaaagtttcaaaatttttaagatcatatgaatttaaaaactatttcttttacaaaaaaagacatacatattgttctaggtgtactatttttttgataattatataatataaaacatacaaatgctctaaatctatatttttgctcttttatggtctggttcagactcactatcatcagcattttcattttctttctcatcactatcaatatcactatcatcattaacattgtctttatcactatcactatcttctgcataaacaggtccagtttcaccaccatcttcataattatacacagtaattaaatttttactttcttgtaatgtccattcacgtgcacttaacattgattgtaaatctgctaattcatcaacaccatttgagcttctaaaagaatctgctaattgatataactgagaactaaacatatctctcatttgatttatatcatcatttcgctgttgaagtattttaccatcttgttgaatttgttgtaatctctctaattctctttcttcatcattcatatcatcattcgaattattcgtagtttctgtacctcctccaagtgatgaaagtgatgataaaatattactcaattcaacagctttattaccatcatccccatttttaagaaactcatcaacagttttcttatatgatgataaatctttatgatattttttatctatatcttccaactctttatatttttcgataataggaataaatttttctggaattgaattgaaattagggacaatatgaggaacgtgaggtgcaacatgaggggcaacatgagatgatgtatgcatagaaggtacaactttcccaggtactggatgcgattgtccattatttgaatttacctgtaaacgatctgtttgtatacttttaataaacccaggtttataaacagctctatccacccaaacttgtaaaactctatcatatttaccctttaaatgtgcacttgcactatcatttgccactatttccataacttgtttcataatttgtgagaattcatttaaatagacactatatttagattcttgctttttactaaattgtaaaatatcattacataaataaaataatgataatctatacatacaatctgattgattatctttattaaattcatttggagtggtaaatgcagtcatccataatgttactatatcatgacaatgacgataatggaaaagacaccattgggatgtactctgaatagattgttgtgtaccatccaatgtctttaacttttgtactgccttctctgttgaaaaagacattctccctgttaaaaatcaatcatgtaaaaagaaaatgattgtcaatacttaggattaaatatctaagagctctcagattcatattgaataataaaagatgggtgggtggcctttaagtgcgacttttattatggtgtttatcaaattctactattattatggcaattatcttcccttttgaacacttcattcctttttcttttaaagacaactacacacagaagtaaataacaatgtctgaaaagtttcctgagattgacgacgtcgaaacaccagttgacaatgatgctcaagattttcttgcaagagaaaagtctgccctcggtgacgaatttaccaccgatcaagattttattgctcaagaaggcgttgatgaggatgatgaatttgaggatttcaaatcccaattccctgaagtaggagaatcaggtgataatcaagttgaaaacactgaatatgatgaagaagaagaacaaacacctacagagactattgaagaatcaaataatgaaccatctcttccattacaattctcaaaccttaatttagaagatagtgctcatgtacaggaatggaagaaaaccagagatttagagattagtaaaagagatgaagctgctgcacgtaagcttgaagatcttaaaaaggaagcagaaagtgcaattgatgatttctatgacaattataacaataagaaggaagatgcaattgctgagactcgtaaagaagcagaagcttttattgaaaagaagaagaatttttttaaagacggaactacatgggatcgtgttattcaacttttagaccttaataagaattccaatgcaattgatgaaactaatctcagagataagaccagatttagagatcttcttctagctcttaagggtaaagaaaatgtccctgctgcatcagcttaatgaactcttatatcataataaaacatattttattatactatttattacaatttatatcacacatgtatagagagtaacctaccctatcatatcttaatttacagtacattgccattaattgcacaaaaaagtaaaaaataccctcatgcgatttaattttatctaatttagagaaatccactttttaccttctgtttcatttaatctctcatttgcattttctttaagcagaggaaggatgaacaaccagggctacccacaacaacatagtggatcacctgctgctcaacaaatgcagatctctcctaatgatcgtattcagtttattaaagtggttctcacatctttacaaaaaattcagggacagtcattcaatttacaggcggttaaaccaatggccgaagagtttgaaaactatgcattctctcattctagtgataaagcacaatatgttcactttcttaagtctaaaattgcttcattgactcaatcaaaaagaccaatcccacaatctcaacagcaacaacaacaacaacaacaacagcaacagcaacagcaacaacaagctccaccacctcaacacactccaccacatcaacaagctccacaagcatttttcaccacacgttaaccaagctatgatatcccaagctaatatatccccacaacaacattactagtatgaaccaatctactcagaatcaacaaaattcaaatttaaaggttaatcttcatactgcaccaattccaaaagcactgttggataaattacctaaagtttttcctccacagatgaatacatggcaacaaatcatgccttattttagaaacaatcaactgaatcaagatgacttacaaacaatcagaaatgtccatgcaacccatgttgaatggttcaaaaataattatggttcatctgtagctccaaataatttacaaaactcacaaccaattcaaactcaaaatagtgcatctatggctataaatccacaacaaattcttatgatgaatagacagagagaacaacaacaggcacaatcacagtcagtatctcagcaacaagcgcaggctcaagctttagcccaggcacaggctcgacaactagctcaacaacaggcattagcgcaacagcaagcacaagctcaagcattagcacaacaacaagcacaacaacaggcacaacaacaggcacaggctcgagcgttagcacaacaacaagcgcaagcattagcacatcagcaggctcaggctgaaaagcaagcacaaatgcagacacaattacaagctcagcaagctcaacaggctcaacaagcgcagttacaggcacaaatgcaagctagagcacaagcacaagcaatagctaaagcagatttacaaaatcaacaaatgcagcaacctcaaatggctcaacagcaacaacaattacaggatggccaacaatcacaacctaatatatcaaaaatcaaacaagcacagattaatgcttataaaacacaggccgtccaagtaattagaaaactgcaatctataggaaaattacctcaaacgctaacccctgaagaagaagccaattatgttagaaagtatctattacacattctgcaaagttcaaacagaaacatgaatcctcaacaaacaaatcaacaacctcaaccacaacagattcaacagcaacagactccaacagcaacaacttcaacaacaacagcaacaacaaaaccagcaaatgcaacagcaaatgggccagcaacaaccttttcaaaacatgtcaaatgttcaacagcctcatgtacaacaaggggtctcttctttaccacaacaaacacagaagagaaactctgctaaaaaccctgtacacaatgtttatcagggtgatattaaacaagctggtatacctaatgccagacctatgagcacagccaattctgtcaatagaaatatttccaaacctacatccattgatctttccactataccaagtccttcactttcaatgggtaacatgaatataagtcacaatacgttttcttcaccagttatgacaaattctcaattttccaataataagcaagctcaacaaaatcaacagtattcactaagacaagcagctcaaaaatcatctgtaagaaatcaaattaatcaacaaggtctaaatccaaatcaattcaagggtcaaactaacaataatggctttcaaccacaacagttaccaacacattcaatccaacagcaacagcaacagtcacaattaccaaccaatcaaaatcaaacttttaatgctgctaattaataatgctggaaacaaccaggcgatgtatacaaatccatcatctgctagaatattaccaggtttgaaagcaagtcctgaagattgggaaacattaagaagtatttatcaagaaacattcaaatctcctataaacttgaaagatatgacctctactttgacagatgaaggtaaaagaaaagttctggcattggtaaaaacatcaaaacaattaatggttttatgtcaaactattattattccaaatttttactttatgacaaaacagtatgatgcaactaaaagaataatttacagtgagttgatgttaaaacaaattcttgaaaaattaagtatttcaggtcaatatgttgctgatgaaaacttagtcattagaattcatgatcaagttaagaagtatttacaatttgttaaggatcaaagtagtaaaattgtaaagtcacaagttcaaactcaacaacccaaacagcaagctttgaatccacagcagatccaggcacagacacaggctcaagcgcaacaacaagcacaagtacaagctcaagcattagcacaacaacaggcacaagcccaagcattagcacaacagcaagcccaagcccaagcacaagcacaggctcaagcgcaggctcaagcacaagcgcaagcacaagcaaagaaaattcaacaggaacaagttgcaagcacaaattcaagctcaagctcagttacaggctaaaaatcaaaatgtttcaaataatccaccaaaaggtgtctttactcaagttccaacaaacattaacccatctgatgtgcaaaatatgatgaaacagcaacaaagtatttcaagtgcttcaccacagatgcttaagaaaatgagttcacaacaacaacgaggatctccagtcatcccatcagttgcttcaactccatattctattactaataaaaaagcaaacacgccatcttctaccacaccagcaccacctgcagctaagaaaccaaagagaaaatacaccaaatcaaataagaatgcaacatctaacagtaatacaccggtacctgcaccaaaaatgacacctactgtaaatcaatccccaccaattagtattagttcaaatgttaattctgctgaagttcaagctgtgttgaaagaaaataatgaagttgttgagaaggaagaaatcagattgaaagctattgatcaggcaagatcacaaagacgttcaattgcaaatattaaaccagcaactacaaagattccatatggtgatggtgtattaagtactgcttccgcatatttattagcaacaatttttgatacatttggattggaagataaagaaagtgacttacttgcaagcgttaaaaaagttagtagtgttggaaaaggtaaatcaagcgttgcatctgttggtaaagatttaactccaagtgctgtattaactacacctattggattgaatgcaaaattacccgttgttgaagaagaacaaaaggaagatggagaaaaaggtatcgataattctgatgtattgtggaaggggaaaataccaacacattgtattgttaatgcaataagagctgttacacatttgaacttatcagctagctctacattactttctaatttggaagataatgaatcaaagaagaagaacaaatcaatacggacaatttcaactatatcaataggcaatacaaaaaacttttatgaagttgtaagggagagagaatgcaataagactacattaaataaactaatgggcagtgataatggatggaaatcaaaatctaataatatttggagtatgaaacatggtaaggtttatccaacacctccagatgattcgatagagaccgcaaaacgtaagttacaatcaggaaaacagagtttacctaaaaaggctaaattacaaaaagattgtgatattttttgggactttgatagtgtttaacatattttcatttgtattattataatttgtaattgtttttaattttagttttatgaacttaatttggtaaaataaaaaatataatctcacccgtttctttttctgcacggccctctcaaattatgcatctaacgttccattactgatttttttagctcttttcattttatcctttatcctacacattttcttttcattttcaattagtttcaatcttaaatatagattgaaatcataatcatggaaaatgaagttatcgacttagatgactttgtagggagacgcaggaaaactagatctgcctctaaaaaagcacaaaattcaacaatagataagaaaaccgatggcaaattagatacgcgtaacgatgaagagccatatttaagtgaaaacattgaagatgaagagagtgaacatgttgaggaagatgatgataatgatgatgattatatagaagatataaagttgttggttcatacgaaaagggcggtcaacatgatccagttgaactgagtgatgatgatgatgaaatcacgatcaaaggaagcaatgaaatttcaattcatgatgaagttgaagaactcgtcggagatgatgcaaccaaactcgagataaaagtagatgacagtatagatgagggagggtttgttaagtctgataaggaaaccaaaaaacctgcaaaacgtcaaagaaagactcctgcaaaacgtggaactaaaaagaaggaagagaaacccaaacttacaccatttgaaagacgtactaatcgattatatgaatcacaccctgatcttaaagatgttttcccgaaattagaagaaacaggaggtagaaaagtggaaagagcagaacagcccgcagatttgggtgtaacattattgaactttcaattagaaggtttatcatggatgatcagacaagaggaagaagggaattatcgtggtggtattcttgcggatgaaatgggtatgggtaagacaattcaaatgatttcattaatgatgcatgatagatcaaagggaccaaatctggtagtggcaccgacagttgcattaatgcaatggaaaagtgaaattgaaactcatactaataatattctaaaagtaggattatttcatggtgcaagtagagccaaaaatattgatgaattgaaagattttgatgttattttaacatcatatgcagttgttgaaagttgtttccggaaggaaaaatatggatttacaaggaaattcaaaaaagttaaagagaaaagtattttacatgaacataaattttatagagttattttagatgaggctcataatattaaagatagaacaagttcaactgctaaagcgtgtgatgttttaaattgtgaaaaaagatggtgtctatcaggtaccccattacaaaatagaattggtgaattatattcattgatcagattcttggatatttctcccttttgtcaatatttctgtaccaaatgtccttgtcgatcgaaggaatggaatttcccagattatagagtttgtgcagattgtggtcatgctccgatggttcatctgaatttcttcaatcattttatgcttaaaaatattcaaaaatatggtttacaatttgaaggtgaagagagtttccacagaattcaattattattaagacaaattatgatccgtagaactaaagttgaaagagcagatgatttaggattgccacctaaaattgttgaaattcgtagagattatttcaatgcagaagaaaaagatttatatcaatcattatatactgattctaaaagacaatttgatgattatgtttctgaaggtgtggttttgaataattatgcaaatattttcacattgattaccagaatgaggcaattagctgatcatcctgatttagttttgaaaagaatgaaaagaccaagtaatggtaactctaaggacaatagtggatttgaatcattacctggtgttataatttgtcaattatgtgatgatgaagctgaagaacctattgaatccaagtgccatcataaattttgtaggctttgtattagtgaatatgttgaaggatttcaaggagatactaataaattgaagtgtccagtttgtcatattggtttaagtattgatttggaggcaccggcattagagatggatacagaagcacttcaaaagggatctattgttaatagaattgatatgggaggtaattggaaatcatctacaaaagttgaagcattaatggaagaattgtatagatcaagatcagatagagttacaactaaatctattgttttctcccaatttacatcgatgcttgatttagttgaatggaggttgaaaagagctggatttgagacagttaaattacaaggttcaatgacaccagcacagaggcaatcatctattaaatatttccttgagactccatcagttgaagtatttttagtttcattaaaggctgggggtgttgcacttaatcttgttgaagctaatcaagttttcattttagatagttggtggaatccatcattagatacaggacaagcagcagatagaatccatagaataggacaacatagacctattagaattgtgaaactagtcattgaagatagtattgaatcacgtattattgaactccaagagaagaaggctaatatggtgaaggctacactagatcaagacgagaaggcagccaaccaacttactgcagcagacatgcaattcttgtttaataattagtcatgacaactaaagagacagtgtatatagacattaattaacgatagtaaaagactatgcagtgtattctccgggtgtagagtaaaaaaagatcggaatgactaattaaaattaaaaaattatgtttctcgaccgtttttttattaaatttttcagtacccagtcatgacacttcgttatctcatgatctgtatcatgattttgtataaataactacattctaagttttttattgctttgtttctattttatcttctttctaacagcaaatgacttacccagtcctcccatattacgctgcaaatgcagcaaccaacttatctcttgatattgttggtcaagctatctatgaatttaatggttcaaatactgatgctattgtcagtatctctaaaacttcaaaaattaatgtattagtagatttgaaggtaccttcattatctgatgaaattattgaatccattcttaaattatacaataatggtgttgcttcagtttttgcaactgttgaagaaggtaattgaaattttatcaaaaattccaaatgctagaattacttataagtctaatactttagttaatgaaaccgataaatctattgcattatcgtcaatttccgttgcaactgaaaaggcatctgaatcagttacatcatttgtttttgctttacaaggttcaagtttagatgaattaaaatcaattactaaattgggttatattccaattgttaaatctgaattattatcaaatgaatatgaaaatatcccttcaaatgtttatccaattgttgaatttataattccttcattagtaactgatcgtgctgatggtttatttactactttagttgtcgattcctcaaatcaatgtttaggtttagtttattcatcaatcaaatctattagtgaatcaattaaaactcaaactggtgtttatcaatcaagaaaacatggtttatggtataaaggtgcaacaagtggcgcaactcaaaaattattatcaattgatttagattgtgataatgattgtttaaaagttgttgttgaacaatcaggttcaggtttctgtcatttaagtactaactcatgttttggtaattttaatggtctaaaatcattagaatctactttagtttcccgtaaacaagatgcacctgaaggctcttatacgaagagattatttgatgatgaagatttattaaatgctaaaattaaggaagaagcagaagaattaactgatgcgaaaactaaggaagaaattgcatgggaagcagcagacttattctattttgcacttgcaagatgtgttaaatatggtgtttcaatttctgatattgaaaagaatttagatatgaaatctttaaaagtttcaagaagaaagggtgatgctaaaccaaaattcattgaaaagaaagccgaagcaccaaagaaagttgaagcaccaaagagagttattggttcaggcgataagattcatttaaatagagtcaacgcagaaactgcaacaccagaggaagttgaagcatgtttagaaagaccaattcaaaaatctgctgatattatgtcattagttaccccaattgttgaaaatgttaaacaaaatggtgataaagcattattagaattaactgctaaatttgataaagttcaattagaatcaccagttttaaaggcaccatttagtgaagatatgatgcaaatttctgataaagttaaaaaggcaattgatatttcatttgaaaatattagaattttccatgaagcacaaaatcaaaaggatattttaacagttgaaactagtcctggtgtttattgttcaagatttgcaagaccaattgaaaaagttggttgttatattccaggtggtacagcagttttaccatcaacatcattaatgttatcagttcctgcattggttgcaggatgtaaagaaattatctttgcatcaccacctggtaaagatggtaaattaacaccagaggttgtttatgttgcacataaagttggtgcaaaatgtattgttgttgcaggtggtgcacaagcagttgcggcaatggcatatggtactgaaactattccaaaatgtgataaaattatgggtccaggtaatcaatttgttacagcagcaaaaatgttagttgcaaatgattcaaatgcattatgtgcaattgatatgccagctggaccaagtgaagttttagttattgcagataaatttgcagatccagattttgttgcaagtgatttattatcacaagcagaacatggtattgattcacaagttattttattagcagttgatatgactgataaagaagttgatttaattgatgaagcagttaatagacaagcattagcattaccaagagttgatattgttagacaatgtatttcacattctacaactatacaaattaagacaatggaagaagcatttgaaatgtctaatagatatgcaccagaacatttaattttacaaattgaagatgcagaatcatgggtaccaaaagttgataatgcaggatcagttttcgttggtgcattatcaccggaatcatgtggtgattattcaagtggtactaatcatacattaccaacatatggatatgctagaatgtatagtggtgtcaatactgcaacatttcaaaaatttattacatcacaagttgttacaaagcaaggtctttcagagattggttgtgcagttatggatttagcagaagttgaaggcttagatggtcatcgtaatgcagtacgtgtacgtatggaaaaattaggattacttccagaaggatattagataattagataattagataattaattattcatttatttgtgtaatgaaccatttatagtattaatattaaataagataaaaaataagataaaaatagaaataaaaacggataatttgagcggatcaaaaaaagtgaaaaatttagaaaattcaccagcctccttttccagtacctgaaacgtaaacagaactttgcaactcaaatcaaactgtctttgcagttgaagaagtagaagtggaggtagaaagattagaaagagaaagatcttatacttggacaacttttctataactaactatgctttgtggattttttaggactattctggtcatagcatgtgctctatcttctattgctttacttttagctgctaatgttggtacaattggtgatcaagctgcaaaatcatcaatttttttacttgaattaaattttgctaacatggatgtttcatcattatttaatggtgctgaaggtgcaactattgcagaattaggttttgctgatgcttatatctttggtatgtatggttattgtagaggtactcaaggtaatacagttatgacagatgataatacttgggaagatattaatttcacaagttctgaatgtacccaatcttcaattgattataaatttaatccagttacctttattgttgatgaaattaatgaacataatactttaggtattaatgttacagaatcagatattcaattacctggaggattaaatgattatgttcaaactgcaagtcatttatctcaagttatctatatttgttcaattattgcaatttgtttgaccattctcgttattttatgtcaattattatgttggtgtgttggtggtgctacaattactatattctttcaaaatttagcatttatttcagctgtaatttcatctggttgtgcaactggtgcttttaaatatattgaaactgaatttaataaatatggaacaacttttggtgttcatgctcaattatcaagaaatttcttagttcttacttgggttggtactgcaatgtcacttcttacaattatagttatcacatttacaagatgttgttgtttcacaagacctcaaccaattgtctataatagagtgttataataattatcatcattatcatcacaactattctatttcttgtcactttctgattcatacatttattcattatcatcgttaaattcttactttttgcatctattctttgtttttttgagtttacaatctttcatctttcatattatgtactttaggctttataaatcttcaatcttttacttaaagcagctggtaaatcaagttataaaccatgtaaataaatacatgaaaaatggatttatcatatcggaattactgtacagagcatttattattttcacttacttaaccatattaggaatcaattatacttattgtaccacagttatttgcttcaacttttttgcttaaactctttaatctcttcttctcctctactaaccaaacaatgggcttattacttccaatacatatacttacatacggatacacattaggatccacaactttccattcatttattgcatcaattaaagcacttgatacattaccacgtcgtcaatttggcgactttcaaggagcagttttaccaattcaatttgctactcaatcaattgcacctgtagtaattgcattaactgctccatatactttatcaactactggaattgcattgttagtttcaagtgcagctggtggtattgcaaatttagcttatttaacaccaaaatgtgcagttttaaagacaaaacgttgggatattgttgataaagattttaatggtgataatgaaaaagcagttgcatcaggtacagttgcttcaattgataaagaatttggtaaatggcatggtgcaagtatggctgcaaatatggtttcaattgttgcaatggcagcttatggtttcgtactcagtggcaaacttaaagtttaggttatttatttgaatttataaatatactattatacaagattctttttataacattatatcatcataatcatttactattgatatctcgttatatgtttggaggtaacattatagctgagacaagagcaggtgatctttcagttgctaataagtcataacttaatgcacttgattttgtatcaccagtttcaacacgaatacctaattcattaaatttagtcttagtctttggaccaatcatcctgcttttggatcccattccaagaactactaattcaggttttggataaattattgaaaataattccattatagttgaaggtaattcaacaactacacctttatgatgaaattctgtaccttctaatgaaacttcaaatatttgattacttaataataaagcgcatacaggtataccttcattatttggtgatttaacaacttttaaacttgaaaagacaattgaatcatttgaaaccatttcaacattattctcaggtttctcagctaatgcataaatatcatattttgctaaattttgacctaaatttgatgctttaaaagttgtagtataatgtctccatactctagatgaagtagaaaacaatcttctctgcatactgtttgtctatactattatattcaataaaagacacactcatatactctatagtaataataataaatcaaccttacctaatatataattttcctagttttttcaactccctcagtaaggatgaaattttcaatattttaaccactgtcatgaattggactcttcaagactactagtttttctttattaaacaacaataatggtcggtgtatctgctatccaacaagtatccaaggcacgtaatggtttaggagcttttattctcccatgtaaacgtgttactatctcatattgcaattttggtggttcatctgcaggtgtaagagattttttacgtttaagattaggtaaatttgcacaacaatatccatcagttgaatttcatgttttagagaaacctggtaaacatccagttctttttggtaactattcaaatgatttaacaaagcaaatttgtgttagaaaatggaatattgatgttgttgaaaataaacttaaattacttctaaatgcttcgggtaaaaaactttcaaaaccaaaacatacagttgtatcacaaaacaaatcagtcagaggtatctggtctccattctatgttcaaccagaacacagattcaaaatataattataatttgtcatataatctgtattttctgtatataataataataattttcatttataaactactttacaatttaaaattatataaattaaagacacatatatcttaaaataaatccatttcttcattcttttgatatggacattcatcagttgcatgtccattcatatcacaatgttcacagaatgaacttcgtcctgcacttggtgctattttctcttcaggaacgtatattttaagtaatccatccttacctatatctctaacctctagtcgtttctttaatacctctatttgttgatcacgttgtattatttcattattatattgctccttttctttcaaaagattgttattttcttctaaaattgttcgattatgttgtattaattcatcattctccttttgaagtttcatatttgcatcttttaaatgatcgttttcaacctttattttttcatattcaattttcatcattttaatttcttcactagaattattggtaccattaccattattacttaatttttcaattttcatttcaagttgataattaatcatttcaaatttccttaattcattaacttctttatttttggatactttgaattgattaaactcttttcttaacatttctaattcattttctaattcctctcgtttatcactactattttcttctattactttacttttttcattaagtttaattttgagatcttcaatactttcacctaatgttttgactgtattcattaacatttcaacttcattttctttctcctttttatagttttcgaatttttcttctttacgtgctaatcttgcatctttagccctcattgaaacatcaagctcatcaatttgtacatccagttcttttaagtcattctctcttgattcaagtctttcttgaagtaactttatataatcctttaattcttgaatttgtgaatcatcaaatataccagattgtcttgtgttactgtgtggagtattatgtatattattattagcaatactttgtcgaggtgttaacgatggttgactattattttgactcaaattattgttattattactatgtacactaccactaatccaactaataatctttcttaaaggtacaaataatccactaccttcaatttcaacatcaaaatatttaataccattaacaattccactatttttaccctttgatattaatgaacccgataattctaatccacaataaacaccatcatgacctgcaactgatccaacatattttaaaatgactgtatccgatgaatttggaaacggtatacgcgttccaattggtggtaatacagatataatatcagttgacatgtctgcttttgttggtgtttaacacaaaattaaagaaagattgtatcaattggaaataccaaaatttatgaaaatttcatgttggcgatttccttagtgtgggaataatttttcaatcaaacttcagttgattcttttttttttcatataacgtatgaatataagaaaaagcatatataaatgcattagagaaggataaaatgtcattaaaaaggatgttaaataagtaataaatataagatattataaaaaaattttgaatcacatatctaagccatttggagcaatcatgattttgacattattttctttatgattaattaattgcataaaaccaccttcaactgcatcctttgcttcaactttaccagtaattaataatttcattgattcatgatcaattaaacctgaatcaattgcatcaataacttgcctaaaatcttcagtaacataacacattgaaccagttgctaatttttcttgataagttaaacacattggaacatattgaattggtacatttggccaaattgcaacattaacagcaataccacctggacctaaaacatctaatgaagtatcaaaagttttttgaatacctgaacaatcgaaagaagttgcaaaaccttcagtttctggtaataaattttttaaagctaaaattggatcatcataatccattggattgaaaacttctgcacctaatttaagggcaaaatctcttctaattgcagcaggttcagaacaaacaattttaccagctctatgaccttttaaagctaaaattgtacataaaccgattggaccaccacccaaaacaacagcagtttgaccaggtttaaaatttgaacaattaactgcgtgccaagcaactgctaaaggttcaactaaagcagctaaatctagtggtaaattatcaggaatttttaaaatatgatcttcaccataaacaacatattgaccaaaagcaccatgatcagtacctaaaccaacaaaacttaatcttttacaacaatttggtttatttgatttacaagcagcacaaaatgataagtctttattaacgatctcatatttatatctttctctatcagaacaatgagaagttgcttcaacaacgactctatcaccaggtttaaaatttttaacacctgaaccaactgaatcaattataccagaaaattcatgacctggacataaaggtaaagctttaccagaaatttcagaaactgaaccaggttgagggaaaaaaattggaccatctaaaaattcatgtaaatcagtaccacaaataccacaataagcaattttaactttaacatcattaggatttttaatttgaggttcaggtatatcttcagaatatcttaattgttctctaccataataaagaagacctttcattttatatgtgtatgtatgtgaatgtatgcgtgttagtaaattagttagtattaattagtatattaagggaaaggaataatataagaatgtaaattatagttatagaaagtgataagtatgtataaaattataaattatagattataacaatttcaatttcaattgaatatagaatatagttttacttaacaagaaaagaaaggaaagaaagtaaagaaagtaaagaaagaaaaggtataaataggaaaaaagatattaaaatcataaaaattgccaaagagatgactttaaatacgaactaataaagttgaaaaaactaagttgttaaaacaggaaaaatctggagtaaattttaatatgtgggggtatattaatatattaaaattaatatatccactctgtgaacaataaggttatttaatttttattatgttgctgtcacattgagcgaatttaaatttaaatttagtaaacttagtatggggtggtttttcatttatttatagtttgcaaaattttttcatcacgtgatggcaactgttttaaattaatttacagaccaatcgaccgcattgacagcattgttttcatcgacgcatagtctccaatatatcgcctgtaattacccttcattaaattgaaaaatatgaattagccgcaattcaagcggcattagttcctattttcggaatttcatcccaaaagggaaatatttcctatttttagcttatcagcttttaatgcatcgttatcttatcaatattataattatcgtatcttcaatatgttttcactgatcattttctatcttcttgtatttatgatgcaatctaaaattcttttgttagactcttcctcttactattattatatctccaaaacatcctcacttatctgatcatctaggtatatttttattgttatctttttttttttcaatagatttcatttcttatctttaaatcattttcttagctatctctttttttttatttatgataagtgttcgagtaatttttttttgctataatcttttaaaacttttctaaacctttgaataatttattttcacaagtacaaaagctatgtctattccactcgtagatttgttctcataatctatttaattctctactatactacttttttcttaaaatttctctcttttaacatcaaacaaaaagtcactacatataaaaaatgaataaagttaaatcagtatttcgtactggtgatatcagttcatcatcagctaattcaaataccgaattctatgaaaattcatcttcatcaaataaagataattatgaaaaaggtcaatatgaaattaatgttaatgatatatctgataacaatgatgatttatcaattgaaaagcactgactggcacttcaatgaaacaaggtttaaaatcaagacatgttcaaattattgctcttgctggcgcaattggtactggtcttttcgttggttcaggtgctgctttagctgcttgtggtccagctggtttacttgttggttatttaattttatcagttatcgtttggttagttatgaatcaaattgctgaaatggttacttatattccagttcctggtcaaactactgtttatgcattatgtcaaagatataccggtaatccttcattagcctttgcttgtggtatgaatttatattatgctcaagctcttattgttcctgctgaaattaactgctgctgcttttgtcattcaatattggactccaattaatccaggtgcttggattgctatattttgggtaactagttttgcaatcaatttttgtgctgttaaatgctttggtgaagttgaattttggattggtttaattaaaattattaacaattattggcttaattattcttggtgttgttatattctttggtggagctccaaattctcacggtgttctaggttttcattattggaaacatccaggtgcttttgttgaacatttagctcatggtaatactggtaaattcttagcttgttggacttcaattatcaaagtccgctttcgctttcattctttcacctgaattaattactgcattgtgcatgctgaagctgaacatccaagagtaaatttaccaaaagcaacttcaagatttatttacagaatgatatttcttttactgtttgtggctctttaactatcggtattatggttgcttataatgatccaagattaatgaatgcaattgatgcaggtgcttcaggtgctgctgcttcaccattcgttattggtattcaaaatgcaggtatcccagtactaaatcatattgttaatgcagccattcttacatctgcttattcctgtggtaattcacaaatgttctcagctactagaacattacattcaatggcattaagaggtgaagttccacgtattttcgctagaactaatagatttggcgttccaatttattctgttacgattactggtttaattggtttagttgcattcttaaacgtttcaaatagctcatcaatagtttttacttggttaactaatatctcaactgtttctggttttatttcttggatttttattggtattatttacattagatatagaaaggcaatggattatcataatatgaatgatagagttacttttagaccaccacttcaaattccaggtgcttggtttagtatcttctttttttcattagttgctcttactaatggttatgctgtcttctttgattttaatgcaaatgattttgttgctgcttatattacattacctattgttttcattttatatgttggtcatatgatttggtataaagaattataaaatgtgggctccattagaggaaattgattgtattacaggtcttgcagaagttgaaaaagatcaagctaaatatgttccacctgttgcaaaaaattttataatgaagatttacttctggttatgttaaattacctgtgctattcttgtctggtttttttgctagtagtttagattactactactatacaatttttgattcttcgttatatactatacttaacttttttctctttctttatctaaatattttataaaaaattcttctattcaaaaatgttatctattgtaaattagatacttcacccaagagttttacttttagagaatcatcatctaattaacaaacaatctcaaagctacaaaaataaacgtttaattgcaaaatttcatttctctgctaagggtcctaataacaatccgattatcaaacaacgttagttgatcaaacacacggcattatacaaacttatttatctgattttactcactgaaatttccagttctatattgttcaactacaatagcaaaccactaactatcccattacatacccttaccctgatactgtttttctgtaaatatttaataagaaatacatcaaaattgtcgatggaaagaagttttctgtatacataaagctaatggctcgcaaaaagagaatactgtttctgatatttttcgctgtctgggttttctattatctacgttaataagtttagtttacagtttttataaaattttaatttcaattttcgttatatgtaggatattgataccaatctcgttaaatagatcatcactctgttgtataaattagcaatattgtaagatattgaaattaaaactatagtatttttgaactaggacttattgctatgcgaaacttttaattctttaactgcgcataaaaattgtttcagccgcattgataagagttatcataattttatcaatatcaaagccagttttacatcctgataacaatttaattgagttattaaaatcgcagccacagaatattatctattgtctaaagaaagtagtaattccgagaaaaaggcttgaaacaaagtgtataataaatactataaaaaattgagacacttctttaactaagaataagagtgcattctttcgggttacctgctctaaagagaaaattttcggaaatatatatcttaatcctttatgaagtcaaaaaattccgacaaattgatctttgaactacatcatgaggaaaataccaataaatgtctgatatcccatgaatcaaagataaagaatggatgagactaaaaaagagaaaaaagagaaaaaagatttaatcataacaactatcttgttgagcagtcttagtctctaaaaattgttgctataatgtaaatattttggaaaccattaaaaaaaattaatgcaatttttgaaacacaaacaaaccatagctcttctcaggaataactcagattttgctaaaaaatagtccaaataaagaaacttattaaaaaagttcatataaatagttctgcttgttgagccaaacgtctatcttcaatcatatttttaaccttttacaagttatatatataactgtgaactacaaatttgtatttatagacttatcgaaaagttcaatttaccgaaaaaggaaatttttcctgaaacagcgctttaacacgaaaatctccaatttttctcaatttttgaaaattgcataattttcatgttaaagtagtattattgacagcaacaatttacacatgtaattattaggtacgtgattgttttatcttggaatttaatatatttaactcgtatttttttagttttcagtaaatagcacctcataaacgaaatgtcaaatgttacatcctctcccattttgtctcaggaggatgccttacatagggcagatcctagttcccaattaagtgatttcaatctagatacaacactacctcaacaaagtaacactcaatcctcatttcttggtcgtcatgatgttaatgaaccaaccagtgatataatgaatgctggaagacaaaatttgactagtggtggagttccaccgggtccaacagattcagcaggttcaggcgctacagagaatgcgcaacgtatgcgtgttagaaggggtgtctcaaatgttccaaaagttattgatagaatttccaatactgttcaagaatcatttgaagaatttctagagtcgtatactgttggtgaatcagataatgaatatgatccaagttttgaaggtaaaatatatttagctagagttgctaaaatggtcagtgatgatagtacattattgaatatcgattttaaacatcttttaagttatcaaaatggtattctagcagaagctataaaggaacaattttatagattcttaccattcttacaaacttcattaagacaaattgttgctaaatatcaaccacaatttttaagacgttcagtatcttcatctaatgatgatgacatgtcagagactgttgacagggatttccaaatttcattttacaatttatcatcagtttgtagaattagagaattaaaagctgaaaatattggtatgttaatgtcaatatcaggaactgttacaagaacaagtgaaattagaccggaattatacaaagctgcatttacttgtgatgtttgtaaagcactcataacaaatattgagcaaacttttaaatatacagaacctacatcatgtatcaataatacatgtgttaatcaatctgattggacattagttatttctaaatcacattttttagattggcaaaaagtcagaatacaagaaaattcaagtgaaattccgaatggttcaatgcctagaacattagatataattttaagaggtgaattggttgataaggcaaaacctggtgataaatgtaaattcactggtactgaaattgtgttacccgatgtttctcaatatcaattacctggtataaaagcggcaactatccgtacaagaggtagtagttcaagtgatgctcttacaacaggtattaatatgagatcattaggtgctagagatttaacttataaaattgctttccttggttgtcatgttagttcaatgtcgggaaaagatttaggagaatccaatgatgataataactcattagaattatttttatctaatctaacacaatctgaagttaatgaattaagagaaatggtttctgatagaaatgtttactctaagcttgttcaatccatttctccatcagtttatggtcacgaagtcgttaaaaaaggtattttgttacaattactaggcggtgttcataaaactaccgttgaaggtatcaatttaagaggtgatattaatgtttgtattgttggtgatccatcctgtgccaagtcacaatttttaaaatgggttaatagctttgcacctagatctgtttacacatcaggtaaagcatcatctgcagccggtttgactgccagtgtggttaaagacgaagagagtggtgaattcacaattgaagcgggtgcgttaatgttggctgataatggtatttgttgtattgatgaatttgataagatggatattgctgatcaagttgcaattcatgaagctatggaacaacaaactatttctattgcaaaagcgggtattcatgcaacattaaatgcaagaacatcaatattagcagctgctaatccaattggtggtcgttataatgctaaagttggattacgtagcaatctaagtatgacaggtccaattttatcaagatttgatttattttttgttattcttgatgaatgtaatgaaagaattgatacacaacttgcaacacatattgttaatttacatcttttcagagatgaagcattaaatcctccatacaccaaggaacaagttttaagatatattagatatgctaaaaatgttaaaccaaagttaacacgtcaagctagaacttatttaattgaaagatataaagaattacgtgccgatgatagtaaagatggtagagcaagttatagaattacagttagacaattagaatctttaatccgattatctgaagctattgcaagagcaaattgtaaagatgatatcacaccaacatttgttgcagaggcatatgatttattgaaacaatcaattataagagttgaaaaagaggatcttgaagtttatgatgataatgatgaagatgatgataacaatgacgatgacgataataataatggtggtaatgatcaagataatgatgataatgatgacggtgataataacaataaggatgatggtgcaaaagatcacgaagatattgatgatgacagaattctagatgatgctgtcaatgtacaaaagatcaagcaagaaaagcaaaaacaatctaatcatattccatacagtgtttttattaatctacgtaacattttcttacaacacattaaagataaagaaacggaagctgaaactgataatcaagttgaaggtgtcgaagatgatactattgcaggttatacgcaagctgaattattagaatggtacatgacagcaattgaagatcaacttgattctgtcaatgaatattgggaagaaatgaagattgctaaaaaagttttaaataagcttgttaaagataacttattaatgcgtgtgaacccagatcctacagattttgatcaggaacaattaccaagtgaattgattatcaccccatcaatgtcagatgaagaaaaggaaaaagtaaaaagagaacaagcaacttggagaaagaacaaacaaaaagagttaaataagaaattagtgtatattatccatccaaattgtccattagaagatttactaggagaagaagatcctgaagaaattgaatagatgacagtttatcattcgttaattttaaagtagaaatgtatatattatatagtcaaatatccaatacgtagttaatttaagcttttacagtttagggacaatcccattattcacattatcataccaccagtcaattccagcttgacctctttgtgaatcaaacctattgattgataatattttgtcccaaagcaaatcatacaatgtataaatatcacggtcgcccataagtgaatcaatatttctcttacagttatctaacatacgaatgaaattgtcaactggtatgaattgtaatacatcaaaagataaaccaactaaaccagcacgacgggtaaacaatttttctggtatgatgacttcattaccattgacaaatgatctcctttcaggtaatggagtgtatgcagacattgaaatatggaaattgatcagatccattagagtaaaaatgaactgaggtttgctgactgatgcatgcccacatttggttataataaaagatgcttgattgaaggaaatatgttttggaaaatgagaaataactttttcgaagtaaggataaacgatattttccatttcttttgaagtatgattactatctatcaacttatctaaaaatttgatcattattgagtgagataattctattgtaggtattttagatgactcagatgtaaaaatagtagccagcattggtgataatgttgtatttttaaaatcttgtttcaaataaggaagtgacttttcaaccaattttaaaaagtaatcaagcttagaagtctcaacatcagaaaacttgttcatagttggcggtatttcgttcaacaaggagtataacaaattctgtagcatttccggagatttttcacataaaatatatgaagttgaatcaaataaaaagttataagaatcaaacccaccagttccaatttgatctagcacatatgagaggttaaacaaagtatgttgcatttgggaagcaatgaaaaatattggttctgataatgggcaagctcctgaaataataaatttactgttggattcaaaaatcatcactactgaaaagaaaatatacttgatcaagttccatttgtctggcttcaattgcaatgattctagattgttattagatatgttggaactaaaagtgaatatgttattgactgatgccaataatatatggatacttctaacagaatatctattattctctaaaagtctagagtaaacaaatacccatctgtttagatacctcaatacaggaatacttttcaatatgtcatcataagataaatctgaatataataatgatccatttttcagtccagtattggaaataaataatatatttgtaatctcttccataattgaaacatttgcagtgcatacttcggcatagaatgaaccatccatatattcataaacgtaaaccaaggacaaagtaaatggtgtttgcaaagtagacatgagatgtatattgtaaactgcctgcaaggaatttgagtatgcttgaatatataacttgtttaactttgaaatagtatgtgaatattgtggatgattgttgtatctattcatataagagattgaagatatatatccgcttagtagaggaataactttccaataagctgttgaatcagctgaaatagcatgtcgaatagcattatatagagcagtgtagaattcataaaatggtaatgaaggatttgtgattttaaattttgttaaaataatatactggaataactcaattagtttggacattgtttcaattgataacaaatttattgaactgaaaaataatgggcattgtaaaaatttcagagtaagaagttcaacattggatgcattctttattttaggataatagtatgctaaatatgagattatcttatcagaatttccggaattagggagtgtatttacgatatcatgaagaacataatcgagttctgttggtatctggatattgctagtaatatagttgttaatattattaatttgatttaagttttgtgattgttgcaaaagtcgactaccctgtggaccaagtctattcgtccaatctgccattctctgaacgtaacaataattgacctaaagaggaggagaaatttaataatttagtaaaagaaaactgtagatccgatgattaaagttctgtacaaatattcatgatactgcgcaaatgtttagatattttttggtaatcaattgattcaaggcaatgttaatggcttaacttacttcaattcttatagacaatgacctcagcattaccaccgggattcaaacagttaccaatagcagtttggtcttctgttgcagtgatagcggccccattatgtgtttcaattcttaatgggaaaccatattttatgttggcatacgatcccttcatttcaaaatggagtcagtattggcgatttcttattattcaattacaatttcaaaatcaatcggagatagcacttgcatgtgtgctgataatgatgaagttgaaaggattggagagagttttaggtagtttgaagattttcaaggtaataatattgctatacatttacaacttaatagctatttttttgatttcatttacattttataaagtgtttgaatgggatttattcataccatcaggaccattcggtatactatttggattctattttgcctacaataagtttatcccaaatatttatgttgcaagattagattttagtaattttgctaactttagaccttttggtgaaactatgtgtgttgacattaacgataaatttttaggatatctgggatttttgcttttgttaattgatgaaggtatttcatcttttatattatgctcaattggttactttattggttatttatacttccatgagttattaccatttacagatagttcattaaactttattgacccattataccataaattaactaaggaacaaacatctataccaatagtgaataattcaaatgttactaataacggttccagtttatctacaggtgctagagatgcaaatacaaatacaaatgctcgttctaatcctaatcaacctcttaccggagatgttgatgaagaatatgaagaagatgacgattacgatagagaaggaggtagcagagaagatacaccggcaagaacgctcggacaacaagtttttgatactttcaatagataaaaagtgatcaattgccaaaaagagtctttgaatatagttacttttagtagttcttattatacacattatttattttcatttgcttttaataatttacgacgttgaacatcccaattatagacacgagcggtattgacttccattgttgttatatttgctcttaagaaatctaaatcttcaagagttatatctcttgattcatttgctttagataaacgttcagttaacatttcaacagcttcatcaattggatattcaagcataacatttgcaccaagccaaagtgaaacagatttacaattttcaatgggtatatcagcagttgcatagattgtatcattgagttgataatctacagagaattttttatttccattttcatcaacgttatcatcatttaattcatcgtcatcatcttcatcatcattccttgaatcatatttttgttttaaaaatttacacattgtaagtgtattttctatatctggtatttgtttatctaaatttgcaagtgttcctctcttagattcttccataaacttatattgttctaaacgcatttgtaactcatttaagaaattagtaacatcagcatcagtacatgtctttggatttacgaaatcatcgatattttcaataaatctagcttcagggattcctcttggattcgatatttcagttttcagtctatcagttgccattgagtgttgtattccagtatctaatcaacagttctaactaatagttaaatcaataaaatgcacatgtgcatgcataagcttcttccagcagctgctaaaataaataaataatttccagccctctcacgtgacccaatatttaacagtgagttagagaaaccctcaaccgctgaaaactaaaaaatttttgacactgaaattttttcatttttttcattcttcttcagcgcactttatagaaagagatatttttttcacctataatatatattagtatcttcattttctcttttcaaaatctttttagtttcttcttttctttcctttatcagccaataacaaaacaaaatgggtagagaccacttcaagaaacctcacgaaaagagttcccacagatcagctccaaagtcagacaatgtctacttagcttctctttctaagttatactctttcttagcacgtacgtattaaagaaacacaatattttatttatttctttgattcttgctatctataattaactcatttttaagaggactttgaatagttacttattcaccaacggatttctattataactgtcaagtataaatgggtgattccattttttgtcaattattggaatgatgtgtcaaaatctgcaagtgcttatttctaaaattatttttagaaaaatggtgcgattatagagcagaattgaagaaaggtgtatttacatgctttgttggaaatttatttattaatttatttattttctacaatgaagttcatgtaataccttttcacaattgtaagatatactaacttttatcattgtttaattacaattacaaaatttatttttattataggtagaactggtgcatcattcaacaaagttatcttaagacaattattcttatcaaagatcaacaaaccacctgtctctgtttcaagaattgcaagagctttaaagccagaagtttctgctaacaagattgttgttgttgtcggtaccgttactgatgatgtcagaattcacgctttcccaaaagcaactgttgcagctttaaaattcaccaagggtgctaaggcaaccatcttaaagaacggtggtgaagctatcactttagatgaattagctttaagagctccaaccggtaagaacaccttaatcttaagaggtccaagaaactccagagaagctgttagacactttggtatgggtccacacaagaacaaggctccaaaggttcaatctaagggtagaaaatttgaaagagcaagaggtaagagaagatcaagaggtttcaaggtctaaggatgttgatttaatatttaaattattaacattatttatctttaaactttaaactaattatttctgttgttaattgttcaattgaattactcatgtgtaaatttatacaggctaatacaatgccagttaatatacttctaaataacttcgcttttctaatcagtacagtaattaacttatcattataacatgtacgattcgattgtcttatcaagatattgtagtcttaactctgtagtaaatgtaattcttatcagcttagggggctcaacattttaatattacttattccatgccgtgactgcgtttgccctttcctcaaccacaacaaaaaaaaattacaagcaaacttttgataaaaacagtgcggtgtccctgtgctctttctaaccctccctccgcacaataatttttgtacaataattttttttccacttgcacctgtttcgctctgaaaaatttgttcctgcaccttggagaaattcaacatagtgcttacactgtaatttcacttgtattatagaattttttaaattaatcatttttgaatttactctaaaagtctttcattacaagccaaaacaaatatgccaggtgttactgttaggtatgtacacacttccctttagatatacatcgagataaacaactttgaacgtttgaacttatagattgatttatgttatgatagtattgaataaaataccaatgtaaattgttcatttgaaataattaataataataataataataataataataagacaactcgaatttatgagtatggtaaacaccgtacaatataaaagtagaaatattgaactatctaagaatcagaactcactctaatttgacattgatactagcccacaactgaaaatacgacatcttacatatttcacctatcaaagcatttatcaattttcaaaacattcatcgaatattacaaatagatcataaatactaacatttcaacccctctcaatttttatttaatatagagacgtttctgcacaagaattcatcaacgcttacgcacaattcttacaaagacaaggtaagttagaagttccatcttacgttgaattagttaagacttcctcaggtaatgaattaccaccacaagatgctgaaggttggttctacaagagagcagcttcagttgcaagacacatctacttaagaaaaaccgttggtattggtaaattaaacaaagtttacggtggttcaaagaacagaggtccaagaccaggtaaacattccgatgcttcaggttccgttaacagaagagttgttcaagctttagaaaagattggtgtcttagaattagctgaaaacggtggtagaaaaatttctgaaaacggtcaaagagatttagatcgtattgcagctcaaactttagaagctgaagatgatgaataatcgtgttgattcaaatttattaattcgtttcatttatacattaaatactctatatagtacataatatacaagttttgtaatatatctctcattttacactttttcaatctaatttatatggtgattaataaactattaaaatctataaatctatttattttacctactctttcacaactttactcttttcagaaaatttatggaaatatctgtctctaaaattatttgtaccttcacgatcatcacttttaactgtaacaccattaaatccttcgccccttttaacataaaccaacagtcttcttgaccatttatggaaatcttgaactaattcataaatcaattcaaaatctttatgttgaggaattagtgttggtatatcttcatcatttgcaactggcatccaaaaacataatcttgaaccaatatccaatctttcacttgaaaattctaataaatcatctaataataaatctaatgaatatgttttctttggttgaatataatctcttcttaaatatgctaattcaccatcaattattatattctctctacctaatttatcatcagttgtaccacaaactttaacaccttcacgaactccatatggtggatcacaaattatactaccaaattttaaattatttctaaatgcattatttgtaaaatccatacataagacatcagtaaattgtaatggtttcttgtaataatcaaaattatcctttaacctacgttttggacctttaccctttaatgttaaaaactcaatatcagatccaattgtaataccaccaaattctgcagcagtgactaaaaatgatccagttcccacaaacggatcataaattaattcattctttttaacttgtcctatattacctgttaataatgataattctgcatcaaatgatgttgtaccaaaatatggtcttttctttatatcatatttttcaacaacacctctacttctagcacttatattaatttgtctaccaaaccataagtgatttggatgttctaatgggaataaatctttacctaatgaataattttccaaaatagtgaaaacttcatctggattcttcattttaattttacccttgaatgctaaatacgcaaatctttcatacattttaatttgttcttcccttgattttttaccaccttggaaagttaaattttcaaatttaaatgttgtatcttcaatgtatttatcaatatatttccccatatttttttgaacattttcgtgtaattcatcgatagtatcaccatgcccccataattcataaattcctctacttaagatagcacgatcaattaagttatacgcttcttcatcattttccaactgaacaactaaaaatggatgttcttcattatgttgagagaaatcagccgttatgttatatagatctgctaaagattctaattcagcttttctaaattgaggatgactctgtgctaaaaatattatataatctttcatctcctatgtacactccttcccttggtatctttaagcattttatctagaattgataatcagtctttaaaaataatttttcatgctctctcctaatgtcaaaataaaaaaatattttcgcttcttcaacaattctcgttctgtaaaattggttttggagggcaaaaagtgaagagatttaattagtgtgttggtggctctttcttcttctttcgtttttactctgtttctctttcttatttcttttatcaaaacaattcatcttacattaacgtgagttttagctctacattagaagtctcttttttacatatatcagctatagtttatttttagttcacagtatagtctctagataaaaattgtttaaaaaagttaaaaaaatttaaaaaaatttaaataaacaaagtcattctaaataataacataaagctttcgacttttgtcccgattaataatagtttaataaatctaaattaataattaataattatctatagaatatattatttacttacttagtttcatagtcatttattattatagttatatttatactactcccatcacacaattatagtacaaaaattaataatgtccaattttgacgacgaagaagcattatttgatgatatttatgctgaagaacaaccagcaactgttggctctgcaacaactgccaaccaagaacctgcttctgaacaaaaaactacttcagaacctgcaactacgtctgtatcagctacaaatactgaacaacaacagcaacaacctttacaatcttctgtaactgattcaaaccctacttatgaatcaacagtaaccaattcggaagaaaatcaaaattcaaataacaatgatgcatctaacaatgcaaatactaatgcaattacagaaattaatactaatgaaggttcagttgaacaagaatccaatgttaataataatggttccgatgctacaacacaagaacaacaaaatatgcaaggtatgatgccaaggtatgatgcaaggtatgatgccaggtatgatgccaggtatgatgccaggtatgatgccgggaatgatgccaggaatgatgccaggtatgatgccagctatgcaaggtatgcaaggtatgatgccacaatttcagcaatttcaacaattccaacaaggtcaaatgtcaggacaaggatctgatgttaatacaccaaccaattctaataatactgctactaatggtaataatggtaataatgaggaagaatccaatgaacacattcctgatattaatgaaattgaagcaccaactaatattcaagattctgttaaggcagatttaactaacaaagatgttggtaaattatttattggtggattaaattgggaaactgatgaagagagattaaagcagtattttggtaattatggtgaggttattgaaattaacgttatgcgtgataacaatacaggtaagtcaagaggttttgcatttttaacattttcaacaggtgaagcagttgataaagttatgagagaaaaacatattcttgatggtaaattaattgatccaaaaagagcaattccaaaagatgaacaagaaaaagttggtaaagtttttgttggtggtattgcagctgatgttacaccagaagaatttagaatgttctttgaaaaatttggttcaattattgattcacaattaatgattaataaagataccggtaaatccagaggttatggatttgttacatatgattcagctgaagcagttgaaagagttacaagacatcattatgttatgtttcatggtaaaaaaatggaaattaagagagctgagccaagaaatcaacatttaaagaatcaaggtcgtgtattagatagttcagtaccaaatatgaataattctaatagcccaatgaataattatggtaatatgaataataatatgaatggaggtaataatgcatatggtggtatgaatcaatattggcaacaaatgcagcaaatgcaacaaatgcaacaaatgcaacaatattggatgcagatgcaacaacaaggtcaaaatggtggacaaaatcctaatggacaagatcaaaatggtcaacaagattctaatcaaaattatatgtcaccaaatgcacaagatgcacaattaaatatgtattcaaacaataatggtaataacggaggttactgaagatgatgatgttccaaatccacaagctcgtgaaggtaataacaatgatagaagaaatggtggtagtagtggaatggataatgattattatgatgatgaagatgattatcgtgggggtagaagacgccgtggaggtggtagtggtggatatagaagaggtggaaatggtggaggattcggtcgtcgtagacatgatgatgaagatgattatcgtggaagtagtggtggtaatatggcagattatgaggatgatgatagatttaataatttaccatctggaccaaagaaattacgtgaaaaggaagatggaggattccgtagtggtcgtaggagtggtaagtatggtggtcgtggtggtaaaagaagtggtggataccatccataccgtagatgagttattagtttagtttgttgcaatgtataaaaataaaattacgtaagaaatgataaaaaaaatttcatctatttcacttttaaaaaaaattttttagtaaaaataaatttatcactgtaaaacctaagaactgtacagaataacttcttttttaaagtaagcaagatgagtgatagtgaagatgacaatgttctcccatccttattaggaaatgcgggggatattagtatgagtgaatcagaatatgaaagtgatgcaagtatggatattgatattattccagaaaataatactgaaacaaaatcaaagaataaatcaaagtctaagaaagttgaacaattagcattcccatcattagaacttgatgatgatgataatgaaactaagaaatcaagaagtggcaataggaatgatgataatgatgatgaaattattatgaataaaccaatggttaaaggaccatttgggtcattaggattgaataagacattagtttcagcaatttctaagaaaggttatcgacaaccaacaccaattcaacgtaagagtatcccattaattatgagtggacgtgatatagttggtatggcaagaactggtagtggtaaaacagctgcatttttaattccaattattgaaaaattaaaagcacatagtgcaaaacgaggagttagatgtattattttatcaccaagtagagaattagctagtcaaacatataaaaattttaaagaatttagtaaaggtagtgatttaagaagcttattagttattggtggtgattcattagatgatcaattttcaagtatgatgagtaatccagatattgttattgcaacacctggtagatttttacatttgaaagttgaaatgagattagatttaagtaatgttgaatttatggtttatgatgaagctgatagattatttgaaatgggttttgcagatcaattaaatgaattattagcaagtttaccagaaaagagacaaagtttattattctctgctacattaccaaaaaatttaattgaatttgctaaggcaggtttaagtaatcctgtacttgttagattagatgcagagagtaaaatgagtgaagatttagaaatggtatttttaagtattaaaaagaatgaacgtgaagcgaatttattaagtgttttagaggatttaattaagatgccagttgcaactgaggaagaagttaagaaattaaagcaagttaatgatgaatttgatgaagaagatgaagaatttgaagaaaataatggtaaaatagatcataagaaaaaatcattaaaaaagaagaaaacttttcatgaaaccagcaaaggcaaatgaattacctgatgaaaattctacaattatctttgtaccaactaaacatcatgttgaatatattagtaaaatccttgaaaaggcacaatatgcagtttcatatatttatggttcattagatcaaattgcacgtaagagacaattaaataattttagatgtggattaagtaagattttagttgttaccgatgttgcagctagaggtattgatattccaattttagctaatgttattaattatagtttaccatcaagtagtaaattatttattcatagagttggacgtacagctagagctggtaataaaggttgggcatattcattagttggagaaggtgaattaccatatttatttgatttagaagttttccttggtaaaaagattataattgatggagattataaaaatgttaaatttaatgataaattagtacttggtagtattccacgtagtaaaattgaagttatggaagatttatatgagaatatacttaatcatgattatgatattaagatgattaaaggtgtttgtactaaagctgaaaaaatgtatttgaaatctagagaaggagcatcaatggagagtgcacgtcgtgcaaaagaattaattaataatggatgggatagagttaatttaattttcggggatattgataaggaagagattgaaaaggaagaattattagaaaaatttggacaaagaaagaataaggaaagtatttttgaaatgttgaaaagtggtgaaaagggacgtaatgatgccctaattgttggagaagaattaagaaagagaagagccaataatcaaattggtagaagggatgagaatagggatgaaattgttaagaaatatagagatgagagtagttatatgtcatatacagcaccaaataataatgagatgagtgaacaaatgcgtgatatggaattaggatttgcaagagaggcagatagtgcaggatttggaattgttgatgatgaaggtaaggatagaagaccaggtaatagtgccaaaatggtttgggagaagaataaatatgtacgtaaacaagatgataagaaatatattattagtgaaagtggacaaagaattgctgcaagtttacgtagtggtagatttgaggcatggaaagcagcaaatggtaatagagttaataataataatagtagtttaggtgatgataagggaaatgaattaacaggacgtagaagaggtggtagagcattacatgttcaaaataagatgccaaagatgccacaaaagggacgtgatgattatgaagttaagatgaagaaatataaagaaagagttggtaataaagttaaggatgagatacgttcaagtgagaatatcagaaaatcacgtgttcttaaggaaaagagaattgcaaagaatggtagacatagtagtggtagaggtggtagaggtggtagaggtggtagtagaggtggtagaaggtaatattaattattaaatattttatagaaatattttatttgtattataatttagatagaaatagaatagaatagaatagaataatcataataataaaaatgagcctccatgttgattattacgtaatttgagaaaatattaatatgttcaataattgataaacaaataaatcggcaatttaaaagactcgtacccattactcactactaattactaattactaattactaattactaattactaattaccaagtaatagatacatcatagaaaatattatgacaagctattagcatttagtaaattaccaaatagggagggggtatattataagctgagggatataattactgagatggaccatcggttcccgtatcggataagaatattttccctaagaaattttaaattttttaaatttttaatcggtgtccgtaattaacggagtccgttttttaaccctttacagtagttttcagtaaatttacttaatatattaatatagttaacttttaaaattttcaaattattttcggacccccactttctgcggagttttgaactcctggttttatcttaatctcagagtggattaatttatataaagggtactactttctcctctaccctaggtttagtaagatagtgctgtacttattattttttagtattattaattattattattatccatttcattacgtaaacgatgttaaccacctacaactttacaacgaagggataatactattatcccaatatcaaattctatacctaataatactaataatactataatactaataccaatactataatcaaaataccaatagaaattgatggtaaaacatttacttcaaaacaagaaattaaaccttggttacaattaaaattatcaaatagtggtattaatattgttattgcaagatctgatgattcaaaaattgttttcaaatgtaaatgtaaatttaaatcaaataaaaaaattttaaaaaaatcatcaaataataataattctatttcaaaacctaataaaaaacaaccgataataccttgtccatttagaatacgcgctaattattcaattagactaaaattatggactatagttgtcgttaatgatactcataatcatcatttacatcataataatattaatattaatgaagttccaaatattgattctaatataaatttaaataaaatgattatgccaccatcaccacctccatctcctccaacaaatgattcaatttctcaaagatcctcaatttatcatatccttaatcccgttgaaaaaaaattaaatactacagccacaccttaagagtaataataataataataataataataataataataataataataatagtttatcaaaatcatcatcatcatcatcatcatcattacctaatgatattccaataacaaatacttcaactgctccattattaaaacgaatagaaacttcaattattaatattcaaaatgaaaaatcaatatctgattcttcgaaaactcaaattttaagtaatgttttatcgatgcttgatacttcattaccaaaaaaatctttaacaaatgctcttgatcattaataaataatttttaataatcacatataatatcaatttattttagcttttttctgctttaccactttcattgtcactatcttttatataaattttgtatactatatatctacactttttattgtgccacttactttttgtatattacagagattaccaccaatttatatatcccatttttttaattttaaaatttatacatacatacatacaaactatgctatactatactatacatcacttctgaaaacatttttacattcaagacaaacataaaataaaaccattgaagtatctttacgtttttgttgtgattgaaagaagacacattcattattatgacattttggacaaattttatcacttcttggtaattttggatcactaccaatatcatcaacgacacctgcagtttcaccaatatttgtaattaattcatgtctataaactctagctgaatctgctaattctgagtatgtacaatttcgacattgatataataatctatgattagttttatcttcctttggataaagcatattgttacaatctgcacagaacttaaatgacatagtaagtaataaatagagagtggtcttgtttgtagattaaccacttgttttaaatcatcaacatgtatcaatttcattcaatcaatcgatgatatttcaaattcatgttggaaagtgaaagtctgaaaaaatacaagaaaatccccagacgcgacggtcgcgactatttttcttatttctcttattaatttttttcttttgcttcccccaattggtattcacttttttttcatgaaaattggacatttcctatagtgaagtttcaatgaattaacattgcaatcctttggaaatacttttatagactataatcatccacaatgtacgcatcaagaactttaagaactgcatcaagaactttaaaagttaatagatttcaatgtattagattaaattcaactgcttcaccagctgttgaaactaaatctgcaccagttgatgcaaaaattcaaacaattgttgattcaatttcaaaattaacattaattgaaacttcatcattaatttcagaattaaagagtcaattaaatattccagaaatgagttttgcagcaggtggatctgcagctccagctgcacctgtagctgaggaagcagctgaaaaacctgaagctgcagctgaaaagacaattttcaatattaaacttgaaagttttgatgctaagacaaaggcaaaggttattaaagaagttaaaggtttattaggtctttcattagttgattcaaagaaatttgttgaagcagctccaaaagtcttaaaggaaaatgttgcaaaggaagatgctgaaaaaattaaggcaactttagaaggtttaggtgcaaaagtttcacttgaatagagagttaaattaatatataaatcttattaaacttgtatatattaaaaattaaaaatatattattataattatcaaaattaaaatttaaaaatcttagtacttatactattaattaaaattctgtaaaatattttgcatatggatcttcacaagatataccataatttaattgttcctcaggataatgatcaaataaacttgtatcaccaacacctgcagtaattggaggttcataaggagtttcaatatcttttaataataatttttcccaaataacttcttgaaaccattgatgattacgtatatcagttgaaccattctgtaaattacctaatctatgagttaaatcaggtgtaattaatttaattaataaatcaactacatcaggatggaaatgtgatgggaaatgaattttacattgtaaaattttttcataagttttcattggtgtttgatcataaaatggtgtataacctgccaagcatttcaaaaattaaaatacctaatgaccaccaatcaacacttttattataaggttttgttgttataacttctggtgcaatataatctggtgtaccacataaagtccaagtaactgttttaacttcttttgcaaatccaaaatctgttaatttaatatgaccatttctatcaagtaaaatattttcaggttttaaatctctataaattatattatgagaatgtaaatattctaatgcaagtataacttcagctgaataaaattttgcaacaggatttgggaatctttgagattttcttaataaactaaataattcaccaccttcaatataatccataaccataaataaattttttgaatcttgaaatgtcccccacattctaattaagaatggatgttcaactaattttaacattcttctttcatcatttgtatgttcaacttgtttcattttaataacttgatgtttttttaaaactttaattgcataatatctatgattatgtacactacgaactaaatgaactctaccaaatgaacctgtacctaaagttctcataatttggaaatcttttaaatgatatttaccctttgatgatgtatccctttgaggtaataaattttcagcctgtaaatttttttgttaataattgataatttggttgaataattgcttgatatgatggcatacgttttaattcttctaattgtttctcttcttcaattgttaaattattatttaataaattatattgattttgtaattgagtttgttgatcatgttgttgttgaatttgtgcttgagcttgagcttgaatttgcatttgaatatgtgcttgcatttgtgcctgcgcttgagcatgtgcttgagcttgtgcctgtgcctgtgcctgtgcctgtgcctgtgcctgtgcttgtgcttgagcctgagctcttgcttgagcttgagcttctaaacgtgcttgcatttgagcttcagcggctaattgagcttgaacttgagcttgaacatttgcttgagcttgagaaatagctaacagctgatcagttgtctgagcaggaaaggaggtattattattattattattatgttgtaattgatccaaattaagagatactgaacctcttgaattgtttaagagatgatgattatccattatcgattattgaaatgcaattgttgttataaaatacgtataaatgaaggttttctaaaagaaaaagaataatgcagcaatcataaatgatgaaacaatggataagatcgatgatatatgattacaatcataagtcaatgtcttcggaaatttggtggaaaatggaaaaaaagaggaatttcttaatttgcgagagagggtgagaaatgaaaaaaatttcaaatttttcatcgttttcatgaattttaagatttaatgtgtatgttggattggatttgattgaattggaatagagttaactagatataccacactcactgtacaaggatggactctaaacaaatagaactggcacgtaaatttgatttaactaatcatttttttgattttgttgatagacatttaatgtaccctttattagataatttagttacaatttatgatgttaaagaagttgataatttacaatttaatgttttaaaggatacttatatgacaaaggagttaaaggaattatatctatctattaatcctaatgaaaaagatttaccaactgaatatttaaatagagaaaatgatattattaatgaattagtaccattaaatgaatcaacaaaggaaactcttaatatactttgctctaaggagattcaatcaaatttaaaacaaaataaaattgaaaatagagaattaattaaaactcgtggaattgatgatgataaaattttagaattatataaatttggtaaattacaatataatagaggtgattatgttatggcaagtgatttattaaataattttaaattattatcaattaatcaagatttaattttaaaggcaacttgtggtaaatttattagtgatattttaagtggtgatattgaggaagctaaaaatgaaatgattaatttgagggatgtaattgataatagaaattatcaaggttcatcaattgatcaattaaaattaagaaattggttaattcataattcattatttatctttttcaatgaaaatgatttaaagaaacaatcaattaatggtaatactaatttacaattattaaatatgaatgaaattttcctttcaagttcatatatttcaacaattgaagcttcatgtccatggattttaagatatattatttcatcagttttatatacaaaagattttaaaagattaaaagatattattaaagcagttgaaattgaaaattatgaatataatgatccatttacaaatttaattcaaaatttatttattgattttaaatttaataaattaaatgaaattttaaataatattgaaattttaattgaaattgattttttcattaatcatttatcaaaagatgaatttattaataatattattgaattaattattcgtagtgtattaaaaatttacaaaaaattatcaataaatcaattatttaaatttgttgaaagtaatttatgtgatttaaacaagttaaatgaaattattaataaaagtaatgaattaaagataaatgttgaaaataatattgttagtttaaatgatgatgaaaatattaataatccatacttttacagtttatgaaaagacaaaggcattaagctttaaatcaaatcaattccttaataatgcatctattaatagtatttgaaagtacatttgaaattactttcttttcttttcttcatatatattatatacaatatcaaatataaacaacatatacttcctatataatatattaaataattctaaatacaagcataatatgtataatcacacacacataaattttcaacaaaattaagatcttggaacaactacaaaattctttgtttgtttattaaatccattagtattagatttcattcttggtttattttctaaaggagttggaataatatctaatttatcattttcagtatcaatttcaatttcatttgaatcttcgagaccttcaccattaataaagaattcctttttacaaagtttaactaattcagcaaatttttcttcaccatttactttatatttagttactttactaacatttttagcagttaaatcatccaatggtaatccttgtaattctaatcttgcaactactttagcaatataccaaaagaataattctttattttcattatcaacaagttcaagagcaacttgaggtgcattatcaccaactcttggatctaatttaagcattcttgtaaaaccatgatttctatttgaatatctttcaacaaataaatccattttaggtatagtatctttttgattatataatttaccatgaagtaaatgtttccattcctttgttgtattatttaatgcatgtttctttgattttgtaattaaattttcaatataattagcagttaatttagcctttgcaggtgtagttgtaatatgttcatgaatgataagtgaagagaccaagtttctcaaagtgtggttgagttgtttactgtttctaccaagcgtcatctctatttatccttgtctattatatttatctacttcctctagaataatataaccttcaatttcaatttcaatgttggaaaagttcaccaagtgaaaaaactcaaaatttctcttcccgctcactgagattttattattatagtggaactggtcttttctgtggtaacttatagggtatacttactatctctatagacaatgggtgtcggtcaaggacttatagctggtgcattggtcacctttggactaacttatgctacggctggtatgtttagaataaatgctgcaaaagttcatttggaatctcaagcggccttaggttattggaataatagaaatgtacctgtacctcatgtaagtaatcgtatagaatatgaatatcatgatataattgaaggtgcaaaagatctgtggaatgaacaagtatcaaagggtgttggtgctgtctataatatgcgtataggtgaaagaacatctgctgcaattgcttctcttttcaattaaactaaactaaattaaactccacaaattagtcttctatatatctctctctctctttttatttctatataaacgcatatatctacatagatatatctacatacactactcaactaaactacgatgataaatatttattaatcttgataataatgttcccaatataccaattataatttgtaatggaattagataccatttacaacgtggtgataatccaagtgaaaaagcaagctaataaccatccaactgtatcagtatgaatataatgttcaccattattgatttctttaattaaaatatctgcacattcattaactgatattgcagttgatggaccttcaattaatttagtaatttcaggtttacttaaattctccttaatatatccttcacttgcaaaattacctgggaaaaatgtatgaacatgaattttacgtggatgaagttccatttctaatgtatcatgctaatgctctaattgcacatttcattggagaatattgtccatatcctggtaatggataaaatgcaactgttgatgatgtaagtactatatgacctttatcaataacatatggtaaaagttcatgaagtaaatatgcagttgttctaaaatttgtattaataccatcatcaatttcttcaagtgttaaatcttgataaagttttggaattgcagatcctgcacaacatataatattatcaattttaaaatcttttgattcaatatatttacctaatcttttacattgttcaatatttgataaatcaattgtatatggtaatgttgtttgaccttctctaattggtgtactattatgactacctgcaatttcaccaagtttatcagctgaacgagctaataaaactaaatcatgtccctgtaaatgatatttatcagcaagtgtcttcccaagaccctgcgatgctcctgatataatcgttaatggcattataaatgtgttataccaaaggaaacagactaaaaacagagtataaataaacataatatagtggaaaagttgatttttttcatgttatcaaattgaaacggcaatttaatatctcttgttttctttttaggttctcttttttcttccgtatagacaatgtcaacacaggaacaattagacgatatcaagggtcaattagctaaacaggctaaacttcttgcaaagactgcacaacaagttctttcattacaagtttcatcaactcgtaaagatttaaatcaaatacctgatccaatccctaattcagataatacagattatgcaacaaatgaagatttagttcaactagttggtgaattacagggtcaacttaatttacttgaacaaaaatcatcatctagaactgcaattgcatcatttatcaaatgatactgatgaaattataattttaccaaatttagatggtgatttacctgataaagaaatattcccaaagacaattgcagattttgctgcaatatctgatgatacaattattttcctttgttcattttatcaattattacctccaactttagaagagagagctgcaatgcaagcttttattgaaggtaaagttaaatcaccaaatgttgaatttaaaccatcagctgatgaatacccacctgaaactattgataccctttataaagaattatcaatctttttaggtctttcccatattaaaagagattcctaatagttattattatagttatagtcatagttatttatttataaacttcattataaatcattaaatgcttgtggtataaattcatgtaagttactcgttaacattgatcttccatattttttatatgctaaatgacttgccaatctagttgttgtacaaccggctaaacatgaataagttaattaattcttcatcatttaattcaatttcatgtttataaatatttgatttatatgcacccattgaccatgcaatgaaagcaccaatcataccagtcattgaatcgccttgacctccaacacgtttaagactaccaggttgtgaacatttaactggttcattaccatgataactaattatatcattagtacctttttcaacaactgtaacacctaataatttaccaattgaatcatcttgtaaattttcccttaatctacgtaattccattacatttggtgtaacttataatatttttattatttgaattaattaataatttttgaatttcattattcattgctaaatgatataatgcatcagcatctaaaattaatggtttctccttagtaattgaacaataacgtataatttcaattaacatttttaacataattttcattatctcttccataaccgggtccaactataacaacatccattctatcaattaatgattgaatttttttcaatttatcatcaattccatctaaatttttagataacatatatggatgtaccattaaatcaggtgaataggttttaattacattagcagcatcggaatcacaaacaatatgaactaaatcaactccggataacatggcagcatgagctgcaaaatatggtgctccagtgtaatcttcacaacctccaatgacagccagtctacccaattgacccttgtggaagcttggtagtaatggtggtaataacttgtttaatttgatcattgtctatataagatattaagaataaccacttcataaccatcattagccacagtgaaaaaggatataaatttctcaacgtaactcccaccttttccatttcatttccactacttctttcttctagttttcttttacttcttgcttctttttcaattaacaacagctatgtcctaagatctttaagtttgctattcctgctgccgctcttgcctggtggtgctttttactataaatctgcaattgcagtttatccacctgttttccaaggtgatggtcaatggattgatcttaagctgactaatattaaaccagtttcacatgatacttcaatttatacatttgcattcccagaatctaatcaaacatctggtttaattactgcttctgcaatcttaactaaatatgttacaccaaagggttcaaatgttgttagaccttatacaccaattactgatgttaatgataagggtaaatttgaattgctggttaaaacttatgaaaatggtaaaatgtcaaaacatattaaagaagttaaatgttaatgatacattagcatttaaaggtccaattcttaaatggaaatggacaccaaatgaatttaaagaaattggtttaattggtggtggtacaggtattacaccactgtatcaagttatccatgaagttttaaagaatgattcagatagaactaaaattactcttctctatggttcaaaatctgttgaagatacattattaaaatcagaattagataaattagctgaaaaacatccagatcgtttccaagttaaatattttgttgattcaattggtgattcaaaggatgttacaaatgttaatgaaggttttattaccaaggaagttattgaaaagaatttaccaaaaccttcagatgcttcacatattttcatttgtggtccaccaccaatgtataaagcaatttcaggtgttaaagtttcaccatctgatcaaggtgaagttaccggtattcttggtgaattaggttataataaggcacaagtctttaaattttaatcttaattgactcactacttgtttatttatttatttaattcctttattgattatttattgactttctttatatagtacatgaacatttattcgaatagtaatagtagtaagtaataaagtgaaatttcactattagcgagtattagagagtcaatcttatagtttacctctgtgtgtatacctctttcttttggtaatggacgctaaacttgcagagacattgttggatatggctacaggccagggtggggatggtgatggtgatgatcctgaacaacaacaagaggaagaacttgatgaggaacaaacaattgttgaagaatataaattatggagaaaaaattgtaaatacatgtattcatttgttagtgaaacagcacttacatggccatcattatcagttcaattttttaaaggtaatacattcattaataaaacaaaggatgataaatattcagttgcacgtaatttattattaacaacacattcatctggtgaagatgaagattttattaaaattgcatcaatgcaattaccacgttcaattattgattcaaaaattaaattaacatcaaatgaattagagactgttaattcaagattgaaaattagtaaaaaaatcaaacaaaatattgaagttaataaaataaggatcaatccatttgataacaggaaatttgcatcaattaatgcaaatggtgaagcttatgtctatgaaactgatgagaaaatgaatatttcaaaggaacattcattaaaacatcatagtgaaaatggatttgggctttcatgggatccaaataatgaatattcattgattacaggatctgaggataaatcaattgcaatttgggattattctaaacaatcaacaccaatacgtgtatatggagatgaacatagtaattatgttaatgatgtacgtttttcatatttgaaaaaaggtattttcggtagtgttggagaagattctcaatttatacttggagataatgataaaattcatatgaaggttaatatgaataaagttatgaattcattaacattttcaccatttagtgaaaatttaattatgtttggtagtgaagattctaataattatatttatgatttaagaaaaatggatgaacaattacatgtattagttggacataatgatagtattacaaatgttgaatgggatccatttcatgaaaatattgttgcatcatcaagtatggatcgtagagttgttttatgggatttaaataaaattggagaggaacaatcacaagaggaatcagaggatggtgtacctgaattacttatgatgcatggaggtcatacaggtggagtcaatgattttgcctttaatccagagactccatggctacttgcatcatgttctgatgataatatagtacatgtatgggcagcaaaggaagatgttgtgcaacccaaacctattgacctgccaattggtgttctatagtgtgtataatggactgattacgtaaacatgtatagttaaatttttcaaaaatttcaactttctatgtaagattactatgggtttactatataggttcctctttaaaggtatagaataatagacaatacaatgagtttgaacttggttagagctttctcttgtgcacgtactgctcttgcaaagaaaatggtagtttatgctccacttccaaatttaagaaatggacaaaatttaatggaacatattaaacaatctcaatatgcaaaatttgataaatcaggtgcaaagcaagctgcattatcattacataataaggaaagaattagagctgatgatattgttacagtagtttacaagaatcaaaaacctgttacaggacaagttttaatggttaaaagagctggtcttaattcaacaattttattaagaaataaaattacaggtttaggtgttgaaatgaatatacctgttttccatccaaatattattagattagatattgttagaagacctgctaattataaaccaagaaatagacattattatattagaaattcaagattagatgttggtgaattatctggtggttcaaaatagaaaacgtctttattctaatttactttaatactattactaatacttgtacaaaataattgatataatataatataatataacataatatcatatatcctactctttatatacttatatatatcatcaacatacatatatcatataatcatacagtcatatctccataatcaccgtatatatttactaagaacgtccattttctctattttactcgctcgcagattaccattttcccagttttcgttcactttgaacagtccattcttctttcatccaaatctatttccttttaaaaaacaaccatgtcatcattctctgattacactattgaagagattgttaatatgtctctctggcagagactttcaatttataattggaaaattgaaatttttgcagttggtgcaatttttgcttatttcattatttataaaattggtgcttcctataataataaaattgcaaataaatttgttaattcaattgtaccaactttaaaggaaaatttctatcaagttggtgttacatcttctcaacttatagctcaagatgatggtcaacattatgctttatatgcatctggtagattaagaattaaatcaatggttgctaaaattgaattacaaatgagaaataatatctttatgtgggttatggaatatattgtttcattcttctttgattcaattccaactccaactgatgaagttactttggaatttcaatttgatgatgaagcaagtgaaaaattcgataattttatatgggcaattgttacaaaggataaaatggataaatttagaactgaaaattatttcctttcattaactaaaacaactgaatcaaataaattaccaaatcagtttgttttcatgaatgaagttcctgaaatgaatgatgttttatttactaaaaaattatctgataatattaattctaatttatcaactcttaaatttttagcaattactgatcaaccaattgaaaaacccgctaaaattgctgaattaaaaccaattaagagacttatcttaaaattatcattatcatcaaatgataaaactattgaatcaatctctaatttagttaattatattattaatgattatcttgatttaattgttaatcgttcatcatttagacctgaacttactagaaaagtcaagaaaactagagaaattgaatataataaattaaagaaacaattagatgatcttaagagggaggaattaaatgagaagaaaattgaagaacaaaagaaacttagagcttcattaactccagaggaacaacaaaaactttcaaagagacaacaagaaagaaagcaaagaaaacaacttaatagacaaaaagttagaggtgctatgtagtatattcttgatctttgtaataaacactttataatttataataataaacactgtccaatttacttactacgcggtgggtatcatgaaaatttacatgtctccatacttatcatgcaatttaacacgcaacttcttctagacatatatacacaatataacactcatgagggttaatatactatacctgttcatatttgtatcaaccgcttgggcatattttactgcccaacaattggaaattatagatcttcatcatagacttcaaccaaagaatcttaagggtacaaaaaatcctcaacgtacgttctattcaatcttatcagttgaaaaaaatgctagtgatgaagaattagagaaagcgtacaaaaagttaagtagaaaatggcatcctgataaattcatacgtgcagatgttaaggaacgtaagaaagctgaaaggaaatttgagtcattgtcattaataatgacaattttacgtgatgttgaacgtcgtaagaattatgattattttgttaagaatggattcccaatttgggataaatcaagatcaagatatattttccaaaatagatcaaaacctaattttattataattgcatcatttattctaattgttgtttcaggtttacaatttttaatgcttaaaatgaataaatctcaatcaaataagagagttaatcaaattttaagagatgttaaatggaaagctgataatatgactaaacaagatgttaacaataataaaataatggaattacctgatgactatgaattaggtagtaatatatcaactaattatatcgttgatgatagactagttacttactgtggtaaaatttttattgttaaacctgattcaactgttttattatataataatgatgatattaatgtcgatgatcaacaacaaatgaatgattttgttacgaagataattgattcaggtatgtttagtctatatggtgtacagaaaagaacaagaaaggaaaagagatttttagataagaataataatactgatgtttcctctattgttgataaatttgtagaatttaaacaagatgatggtgttattaggctcagtgattggtttgttattaagttgatattattcttttggagaattacacttggtaaacttgtacctgcatctacaccatcaaattcaaaatcaattccacaaaaagaaactgaatcatctgatgaaccgatctttgaaaaagctgaaatcaaacatgatgctgataagatagttttaccaaatggtaaagttttacattcaagaaagaaataattttataatactgtatcattaatgttttgtataaagttatataatcaatgtgcaaactgaagaactccagcaaatacgataaataaagtttgtcatatcattagcttcattgtctctaacatttgaagtaaaattcaaattattataacatctagctaatgcacatgcgttgtaattagagtaaataaaatataatgattggtaaacttccaaatcctattaatgatgataatgcaatattttgattctcagttaaatagatattctcaggaagtaataagaatcggaacaagtatccaaaagttaatgcaaatactgtatcaccatactgagagaagtaatcccatgatgttagttcatataagtacttgaagtcttcatttaatagtaaatattgtgtcttaaaccatttcttaattttcccaaaaattcctaatcttgtattggctgcaatatcatcttcttgatattgatttctataatattgaatatcccaggcatcttcaattcttaatttgactccataaagagcaggtggtgtatcgataaatgattcataataatatttattaaatgttaaatgataaatgagcttaagccaaaatcttatattgtataaactttttaatatgtgatgttatacctacaagtggtatacccatattaaattgaaataagacacatgatgataatagactgaaaaagctggacctttgatgaaactaatgagtaaaacgtatgtggtacaaacagaagagtcaatatattcaaatcagtaggctcatctctcataatatcgggaaaccatccaaagttcatactcaaaaatccctgccatcgtaattaaagataaagctgatatgcccaatcccatcgcagctattggtacaatataacaagctgaattgatgaaatcaaaaaatctgtcaatgcttaaaaatctggaattgttaccataaaactctagattatgaccacaatttttgcatctaaccatataaccatcagtaaacccagaattccataaaatcagcaaatccctaaacgtccgtcgtggccatcttggattaataaatcctactcgtaaagatattttatcttgtatgtatgtgtcaatttgagcaaaacttggtttagatacagtgagtttcatagtgttgggtttttcatatatagcatttatccatttctttatattatgtatactataacaactcgtagcattcattccattttcaattacatattttgaattatgagttgcacatgaaatgtgatatgtggctgcgcaggaacaacaattaaacctagttgcatcagtagttgctctattacaaagaatgcatgatatatccacgggatacgggatatctaccgcctgtcataatacgagcatcactgttagttttaaaacgaaactccatgtagagatgtagagattgtaaaagatacaagagattgattcatcacacaaacccaatgagcatgccaacatgaatttttgcagtgattcatttttatatcctttatgcaaaattgtttctttcatgcatgttatctaatggatcattgtgctatctgtctggatgatgggtcgattgaaaacccattggttaaaccatgttcaaaatgcagtttaatgacacataaaagatgtatgttaaatataatttcaacaaatttaataactaaaagaatggcaacacataaatcagttaattttttaacaaatgaagcggtaataacaactgatgaaggtacatttatcaattatggaggtgaaaaactattagatactaatgcagctttttgtactgttccacgttcaataaattactataaattcttgcaaaggggtgggatttgttctccaatgccaaatttccatgcaagtgccatttttgatacagttttttatcatgattttggtaaagatacggtggtattgatagataaatgtttacaatgtaaaagagatataaaggctgaaaaaaagagcaatcgaatgttcttttttgatagaatagtaaaatctctcaaacttgatgttgaattggctttcataatgcaaacacttacagcatggaaagttgctagtaaagaagtaatagatatgaggggagtggttagccattttattgaaatgtttgctacattagcagctgtagctccttggttattcttacataggaatcttaaagatttcaaggaagtatttgaacaggatccaatgatgttaccattcaaatattatgatctttactttttggcttattctcctacttctgccactttatggtatacgtttccctttcatttgctaattcttggaagtagaaataatagttttacaagattattcaggaaaataatgttgattgttaaaatgttaagtaataagttattatacagtgtgtttaacttattataccttaatcttgcaattgagacgcaacatgatcggttgattctatatgttgagcatatcgatccacttttcgaatataaggtactaaataaaagattgacatttcaggataagtggaatattgtacaacagagagatataaaacttatgtttgaagagggtgcaataaggaaaagttctagcacagttgactataagcaaccaataaactcattaatggtgatgatttttggaccattgattggaaataatatttatggtaagtgtaaaccattggttaaatcaatatataaacttttctcgtcatttggcatagtgcctgttgaagttgaaatggtgattgagtatttaggatttcaaacagttctattcctcaaagaggtttatgaatattttagtctttactataagcttaaatcaattgaaaaatttaagcctgtacagagcaaattaaggattcctatgatttcccgtggtagagctttcaaaatgtgaaggactaatgatataatatgtcttttttttttaccataaatattatacatatgataaagttatatataatatataaaatacaaaatatttaatgcaaatttaattaaatggatgaataaaattaaactctcttctttttcattgcaccaacatttgcagtgaaaccagttctaattgaagtaactgatttagttgaaccacaagctttacaaacaatgaaatgtaatctattagcagcttctctctttaattcagtattcatagatttacatgtcctacaaataacatattcttgaatatatcttcttaaaacaccttcaatattttttgattgaaatctacctttaataattaatctttgttcaccatcaatagaacctgaagtacctaattcagcaaaaagatattgaattaaatgagaaggatttctctgtaaaacttgagatatttgttgaacatttgcaaaaattgttttcttattaccatctcttaacacttcaggtggaggaatttttcaatttttgttgttgaccacctgctaattcaggatttttctcctttaatataccataaaatctatctaataattgagaatatgggattaaatctgattttttagaagtttcattaactattgattcatcaatacctgcatcttgtaattgtttttcaaattcatcaatatcagcagcaactactttcttcttcttcttctttttcaatttcattccttcaaaactttcagctaaatcatctgtaacatctgcacttggttcttcacttgtatctttcttatccttactcttcttcttctttttctttaatcctgagaaaagatcatcatcttctgttgatgcaactgtggtagtttctgaatctgcagaaactggtgcaacatccttactcttcttcttctttttaatggaaggatcaaatcctaattcttcggcagacatttcaagcttgtcaataagatatattcaataaaagattcaccagaaccaaacctctgtccctctaatgctattaagctccacaagagtgaaattttgaaattttttttccattcaaatttgtcatattaaaattacttagtgaaattttactgtgcgatcgtcccatcgtctgttaggaagagggtcttggagtatttgccttttcttggattaaatacaaacttatatacaacttaacgtatagtatacttattgtttttaggagattcgaccaatctttcggatttacgaacatatattcagttacatacacagtataggtataagcaccagcaatcatatacttgaaaagattctctattgtgggttttacattctatcaatgacgtattatatatatagttatccccgaaaatttggttcctataaattctaaaagatctgccatcactttttatcagctgataaaacaattaaacttttcgtggatgtaaaacagcaatgttttcataaaacaatttaactttccatggatgtaaaacaggaatgttttcataaaacaatttaacttttcatggatgtaaaacagcaatgttttcataaaacaatttaacttttcatggacgtaaagcaacaatgttttcaacggaccataaataaccgtccaattcctaatattttagctttcaaaagaaaaatctatttgaatttaattttttttttattccatctttatttcatcctttatttatcaaaaatgattcaaattaagagactgtcattaattatcagtattgcacttggtttcaccttatttggaaatgtttttgctgctgatttaggcgacaacattacaatcaatgctggtgatagcaatgccaaagaacaacttgctaatgcattatgtagcagctactcaggttcaaacgtttgttcagataactcagcaagaacaattactattaatggtattattgattttaatcaaaatgtggcatttcaaaaagttaaaggttgtgtctattctgataataattgtgttgatacaaagggagctgaacaaattattgacagattgggctattgcgataacaagaaaataattgatgttactattaacccacttggtcaagatccctggttgtaggctcaaataaagtcattagaggggcaggtgctaattcaggtgtcaaaggtagagggtttctcttaactggtggagtctcaaatattataattgaaaatttgagtattacagatataaatgaacaggttatttggggaggtgatgcaataactattgataatgcttctaatgtgaaaatagaccacaattatattgcaagaattggaagacaatttgttgtaacaggttggggaccagctactgatatatctataacaaataataattttgatggtacaacaggttatggtcactattgtgataatcgtcattactggaatttccttttttatggtgctgcacaatctattagctttcaaaagaactgggttcataatacttccggaagattaccagaagttggacaacaagattcagttacaggggctggaattgtccatgttgcaaacaatcttttccaatctaacttctacatgggagctagaacagcaccaaatgttgctattttcctagaaggtaatgattatgacaatgttggaacaaatatcaaaacatttaaccctataatgaagaaaaatagtaatgaccctatttttgctccatcaattcaaaacttaaatgcagctaatccttatttgtaattcatacttgggcagaaattgttttcctaatatttttgaagacgggcaaacctataacacttttacagttgataagagtattttcaattataagttcaatgtgaatgtaaaaaactttgttggtggaagtgcagaatatcgtcttatggacactaaagatgttaagaattatgttcttaacaacgctggtccaaaatagataaaatgaaatcaattaaaagaacgtttgacatgtttgttttcggatagtaattgttgtaatctaacgactctttgtgcggggtccatatttctaacaacaagattaaaagaaccaatcacactatataatgtataaaaataagtgtaactatataatatataagttagattatattaaatcattactctaaaatctgaaaatactggttcataagttaataaactgaaactaatggattagattcaaagactgatgttttcagcttgttttctgagttcttcaactgcttttgcatcttcttctgtaacattcttaatttcagtaccttcactgaacttaacctctgtattatccttactaccttcctctgtattttcatcttcatctccttcttcattatcaatctcttcttcaacaatattaccaaatttttcaagtaaataatcatcaactttttcttgttcattattacttgcttcaaaaaatgaatcatggccatatttattccttataaatggatctgctccattatcacataataattgaacaatttctaaatgtccattcaacgatgcccaatgtaatgcagtattaccacaatcattttctaaatttagtaatttcttcttttcctctacatccggtataagtgataataaatatttcaaaacttctaaatgtccattagctgctgccatatgaaatggtgttgaaaatgtatatgcatctttaattgttgatataactgaagtttcaacttcatttgtgaaaatctctgttagtgattctaaatcaccaaatctagcatcatagatcacattatccatttcctcttgtgagagtttatcaagttttgtcatagttattagttgattatgtatatctgtagagagcacttcccttcaccaacaattagaacttaatgattttaaagtgaaaaaaatttgtcaactgccactgcatgaaaaaaaaatatattttaattactctatcaggggaaactgagaaatttcagtttaataaattagatggcgttcttattgttgtatagccctttactatgacttcaatggatcaagagaaattggaaaagcttaagaaagaacttgaaaagtttaaaaagggggagaaaattgaaggtagatcaagaactactccattgggtaaacttttcaatgaaatatcaaataaattatcagcatatcaatcacaaacggatgctgttaaatatctttacaatcaattcacagataatgatgtggaaactcagattgatcaaatccagatgagggatgttgttattagtcaagtacttgaatatttcgataaaatcaatgagttatcaatgaaaaagaaggattcgactataatttcaatccctctatatgatattagaatagtaggtgatctgacaaatatcatattattacatggaatttactcaataataccaaatgaatatcttgttcctttgaacatgagaatgttgaaaaactttaaggcttctaaaacattcattaagattgattttgaaaaaggtttattcatgcttgataaaatacttgaaaaatttacaaaaatttttgaaagtgatagtgatttgaaagatatactcttggtaggtactgggttcactgatattctaacaattgccgtggtattgtattccaaattcaaaactgatcaatatttatcctatttgaatagactagaaacattaagttcaacctatcaattattatcattttactctatattatacaagtattcattgaattctgtaaaaaacgctcaatttacaaagtatatctcatcattattatgcaaaactttgatgaaaccaaatggtgttcagtcgctaatagacttagtcatgggattaagagaagatgaagatattgatattgctaaaattccttatgtagttcaaatattagtttcttcaagacctcaaacttgttcaattgttcaatattatacaaacatatttgatcaaattgaaaaaatgttggttttcatagatagacctctaatgaacactgttttaactgaaattattataaacatctatcaaaagaataatcagattataatagattttctcttcaaaaaaatatgggaaaaattgaatccagaaattagaattaaaaatggtatggaagattctgatattgttataataaatggggtggaattaaataatgcattcaatgtgtgtatttcactttcaagatcatttacgagtactaataaagaaattcttaatgagtttatagaaccaatattgttaccattatggtattatgcaaatcatcaaagaaaatcaaataagagttatacaatcattttgaatgttcttaaaaatgttttattactaggagattttgatcattttatgaacttattaatatccaacattgttgaatataaaccagcttggaaatttgatactgaatcagaaaacaatctgacatatattaaacttgatactaatgagtcgcctgtttctaaagagagcttcatactagatttgtttgatagaatagattttaatgttgcaacacttattgaattgtctgaaatcttaactcaatcagattcaaaatacatgaacaagattcttattgatattttaaatcaattagttaactatgttgaaatatctgaagtggagattccaattaagagagttgttattttaaaattacttcaatctgtaattgaaaattttaaatcacaaattgagaatgaaccaatatcattattaattttcacaaatacttatttcagtggatattttgatacttgtagatcaaaactagcagttgaagatatttatgatgagtcagattcagatgatgaggatgaatatgatgtagaaatttctcaaaatgatgaattaattaactcgttattacctatacttgacattttatcaaatttaacttttttcagtgaagaagaaaaaattcaattagaaaaattacaatccatgtttgaacataataaaaagtttattccaagatcaattgctgttgttgttgataaaattttgaaagttgatcctaaacaacttacaataaaaaaagatgaaaataacgagttcaatgtagacacaatacttaaacaagcaaatgatccaacaccatcaattaaagtttttgctttggataaattaacaaaacaaacaatgttattgaatgatacaaaggtactaaataccaacaataattccattaccactaaatataccataactttattagtatcacaactaagaaactcagaaccatttgtttatttgaatgctattaaaaatttggtttcattaatctcttttgataagtcatacactaattacattctcgaactatactctcaatctaggaaatcaattgatgaaaaattaagactcggtgaagttttgacaagattcatttcaatggacggtaaattattaactcctgagattattcgagacattgttaccacttgtataaatatatcaagatcaaactcaaaattacaagaaaagtacaaggataataaagatgttaagctgaagatgtcagcactttcaattttaggtttaatttgctttgagacagggtttggtatcatgccatatgttgatgaaattgcagatttagttcaaggtattgtcaactttgaaaaagatgcagaattaagaagagctgctgtcgtgattatcaatgatattgtacgtaatgataaaggactagaaattattcagaagcatggtaagaagttacaaattttacttgaatatgttgctgagaaagatcaagatcttttagtttgtcaatttgctaataatacattagctgaaattgaagaatcatttcaaagaaagtttactgataacttgaaattgaaatagtggaaatgttctgtgtatattgctttatagaaaagagtaaataaaaatgtatataatatgtgaggaaagactattcttctgctaaaagttcgaaaggattgttagtattttgagtaatttcctctaagatttcttcatcatctttcatttcatcagctaattcatcttctaagtcttcatttgtaattttttcactgttacttttaatgataagttcattttgaagtgagtttttagcaatttcattaattttatcccaaccagtttttcttaaattaccaattttcttctttctgtttaaagcattttcaatttttttacctaaccttccatcaacactttggaatctatgttgctttgaacgtatagttttagaaaccatatgttgcttcttcttattattatgagttgttatgacatgatcaccaggttttaatttcatttcatttttacccgatctactcaatttatcatttaataattgttgattctttgttaatgatgcacgaattaaaggtgaaattgtatcagtattttcaagtcttggaattgatgaaagttcctttgcttcagtactattgaaaggatcaacttccccacgacgtgcagcacgtgaatgttttgatacaccacctttctttgccatttcagttgtctacctaaagataaagtaactacagtagttaaaatccaagctaaaaaaaattgcaatgaaaaatcattaatgaaaaatattttcatgttacacagcctggagaagtctttatcttataattgatcgatctcaactcttcttgaggtataacggatggggtttgaagagattgaatataaggaaatataccagaactatacagagtttgatcatttgaaacctttgttgttaagtatcaaacataaggaggaatgtttagaaatagaatggattgaaaacatcattgataaaatctatgtttgtgaagatggttggtatgctaatgaatttcaaaatagtcaaaaattccccacatttgaatcattagcaatgagaagaagtgagattttcaataagaaatgggcggaaacattgtatatgaaactacaagagcttgatgaagagtgattgaattagatttaattgaaaattattaaaatacaaacgttatacagttactaaacctatattctaccggaattaagtaataaatttatatgttgtcttaagaaatcatcagtgtaaaagtctgattttcttactatttcctcactacctaaaccatctttaccaaatgacattgaatcacttgataaaattttcaaatattcttcattcttctgtataacctctttcaaaaattcaacaggattttcactaaacttcttatagaaatcatatttacttttcgaataaataagtaattgcatattaagtttagaattttcatctaatttagtaagatctgccatattttgtttatttaaaatatcctctgttattaatttattaatatcatccaaatcagataataaagctttctttccttcaaggaatgatctattaactttaatatcaactaatacttcacctaatgtagtattctttaatgtattaatatgataattgaccctaattggatctaatggttttaataacttattaccaacaatttccataatttgaggcattgtcatagttggtaaatcaaatattttcattaataattcatctgatttaattaaaacacttttcttacctttgctcttatttgagtcatttgatttttgtacttcaaataattgattaacctttgcataccaaaaaattcttttaatacattcagattgtgtaatttctttagcacctacaagttcaattaaatttggatctgaaattttcaatttaattgggaataattttggttgaataacaatatgagcaacaatttccctttcttcaccttcaccatttacaatacttgaacctgcacgtttgatatccataccatcaaattgtttagcaagtctttcagcttcaggtaatttattatcatcatgccactcaatgagagtttctgaattacctgttgaacccggtgtgtttacacctttaatatttagtggtatatcgtctttaccatcagctggttttaattcaatacttaaacctgataaaaaccatgacattttatgtcttgattgatcagttaatggagttttatcatcaattaatcgtccttcaactcttagagtccaagcaggagttggaagttgtgattgatcctgtggttgttgttgattatcattttgaatttgccatggttgattttcacttgtattataaatataaatacgtaaagtttcttcattaatttgacctgataaatcagctgtactaatacgttgttgatgatcttgtaaatctaataattttctattaatcatcatatctaataaacgttcacgactttgcaattgttcatataattctactttttcagcaaaatgttcctttaatgaaggtggtatagtttgatcagttggtttcaattgaattggttgatttgattgtgatggtattggttgttgttgtgtaggttttgaaattggggtagtcttctttacagaagaggtatcactacctggttttgttaactgttgtttcttattacgttgcattgacattatatattatattacaacaattgtatcgttacccaccggtatgtaagtatacgttgttcaaaataaagagtggtattaaggtgtagaaaataatgataattgaaatgtattggaaaaaaacaaatttctcgcttttggtgaagttattttcaaaattggggtggttttcatgtgagctttcactaaggttgactaaagtgaatgtattgatatcacattgtgtttattgaagtcaaagtattctgggttagtattgccatattatcaattaatgtcatttaattaggagtactgggatgaaagaatccaatgtgaaaataggttataaactataatgtattccatttgagtagacgcgtctgatacactgatcagcttttgtatgtacttacgatcaatggttcatcttgtcttgtaaaatgctcctctatatgaatccataaatgatagtatcaatttaatatataagtagaagtatatacaatatacaagagtttttttatttagtttaaattaattatttcttttcgtttttaagttcttcaacaattgcagcttcaataacctttaaatcagcttgttcaataagtttgatcttctttggcatagttgacagttttttcagttcatctggtaaaacatccttttcaaatgaataaccttcaaaaccacttaatgcaagattaacaacttctgagaatttagctgggtgtgcagttgataatgaaatataatgaacatctttatcatttgatgaatcaattaatcttaaacaagtattaataccaacagcagtatgtggatctaagatatatttgttggaagtaccatcgtaagttgctttaatagttgaaacagtttcttcattagtaactgaagcagattctaaaaattctttagttgcatcaataacatcactagagacattaaattcaccagttttagaatttaatgaatccataaatgatttcatgatttcacctgttttcaaatcatcattcttaccatcagtttttctaatcatataccaaaggaatctttcaaaatttgaagaaacacaaatatccattgctggagagtaagtaactttaacaggaactttatcatatttacctgaattaatgaatctatgtaaaatgttattttcattagttgcaacaactaatttattaattggtaaacccatttcctttgcaaaataacctgcaagtatatcaccaaaattacctgatggaacaacatatttaacatttaaatcatcatttgaaccaagttgtttctttaattggaaataagagtagaaataataagtcatttgagctaaaattcttgcccagttaatagaattaacggcaccaatatgataagtattattgaattcttcatcagcaaaaacttgtttgactaatgattgacaatcatcaaatgtaccattaactgagaatgtatgaatattgttatcagtaacagttgtcatttgatcttcttgaattggagagactctaccagttggatacataataaagacactaacatcttttttatttcttaaaccgtaaattgcagctgaaccagtatcacctgaagttgcaccaacaactgtaataatatctctttcttcaccttcctttttattagcattttttctttgtaagaaatattcaaataaattaccaacaaattgtaatgcaacatctttaaatgcataagttggaccatggaaaagttctaaaatatgtaatttttctcttgaatcaatcttaactaatggagtaacatcctttgatctaaaagttgaataagatttttcaattaatttatttaaatcatcatctgggatttcttcatttttgatatataaacgcataatttgaaaagctaattcttggaaagttaaattttcccatgatttaatatcatttgatgaaatttgtggaatttcagaaggaatgaaaagaccaccatctttagccagaccggtgataattgcttcttcaaaagagactgcttgttcagtacttgatctggttgatctataaacttgtgacattgtttatctagttaagtaattatactccttctcctgaaacactaaagattaaagatgactcaaaaataatgttaaatttttcaagagctcacccaccacatgttcttttctttttctctcactctttggaaattccgtcaccggagattttcacttcgcattttaatttggattattgtgttggtaattgtgatgatagtcgtaagagtatagtagtaggagtgtgtataataacttagggagggtagtgtaatgtacttattggttatagggggaaaaaaaattttataaaaaaaggacttagttttacttaattactacattgaaattttaaaataaaaaggcaggtcgagcccggattcgaactggggttgttggaatcagaatccaaagtgataaccactacactacaagaccgtaaccgcttagattaatttgtaggatgtttataatcttggattttttaaaaaggtgccaaaattttaaacgctcttttctcaacaactagtggtattatgaaatcgatattcacatagttcgaaagaaaatttgtggttttcttgtataaataaatttatagtagcattttggtaaaaatgtctagttttcaaaaatcaaggaaatgttctaaaattatcaaaattaatcaaaaaacatttatttatcaaacacataaaatacaattattaacataattacagtactacaacaataatttaatttcaaaataaattacgtttaagtttttaatggaattatacaatcatttatatacaagaaaagaagaaaaaacctataatttaggaattgcatgatatcttttacctcttatacctaaaactttttgattatattggaaaacttggtgaggatttaaatcatttaattcccatttagttgaattatataaattatctgatttatcaaaaataacatctaaatctttttcatattttttcaaataatcttcatttgaattaatattttcattattataaccagttataaaaattggacattttgaatccaataaacctttaattgttttatcccacatttcagttaaatttggattattaaattgtggatgataagcgacaaacatatctaaataaggatcataagggaataaatcaccagcttcatgtaaaacattaaaatcttgagtatgatgaacaaaacataaagtatcatctaatcttttaataattggtttattacttactaaatattgttttttctctctatcaaaatatgattgaggaccgataaaatgtaattcaaaactaacaccagggaacatgtaagttaattctttccaaacatgaggtggtaataaagattctgaatttgaattaagtaaaaagattctcattggacgatctctaaaatttgatagtctatgttgtggataaagagaatatcttaaagctgataaagattttaaaccttcaattgatagaggaccttttggatttaagaaataaggagagaattgatgtaaaattgaagctagagtcattgggaaactcaataatttagtaacaattgctaattgaaattcagtatccattgaactaaaaccacgagtatagaagaaagtatcccaatttgctaaattaactaaattatctcttttttggaaagttggaaattcgaattctgggaaatctctaccagatctaaggtcgtgttcataaatgttaacttttttcaaaatatcataaattttattatcttgataatatttatcattttcccaagcctctttagaatgatgagttggtataccagatattggacaagtataatcgatatttaaatgagtaacaggacatttagcctttgctctaatagttgcagctctcattcttaaatcaggacatggtgatgaatcccaaggatgaaatctattttcaacagttggataattatcagattgaggaggatcaagacacagaactgatctaatgaatcctgtaaagttcctacgttgaacaatagggagtgatgaagctctaagggacatgattgttcagttggttaaaaaagtgatgaaaagagattgtatagagttaatttaatgatacaatttttagcaaaatggaaaaaacaagaaaaaatgaagaaaattagaaaatcaatcccctaatgagaaaattgagaatttgatacctgttattattattaagagtatagtaatatctttgattggtgttatacagtagatcattagtatatcactaaatataatataaaatgcaattagtcaaaataactatctatccaacttatagagggatttctcttgattgtatcaatgaggaagtgtatttcccagaagatttaccagtgagggccattggtagatgggtagaggataatcctaggtttgaaggattagagataactgagatagagaaatttgagaaagatttagttcttataaggggtgaagttcctgattgggtactgggtaaatcaagatatgttgttgatagtgtttcaatcaatgatggtaagtcattaccacctgataaggatacaatatttacaactgaggaagttgttgttggtgaaggatatgtggcaatgactagaggtgcatttgttaaattatcatcattagctaacaatatgaattggaataggagtaatcataaacgagtagagagtatgaaattaccaaaggttaaagttgaagaagttgtagttgataataataatgacaataatagtgacaataatagtgacaataataataataacaataatacagattatgcattttggggtacaagagggattgaatttattcaattcatatctagaactataattggtttatttttccgaatactaacagctgtaccaagatacatgttaatattatacttcattgatagattacttgtaatgattttcggagtagccagatttaaattgagaatgattgttgaacctctagttttggtgctaatgataatgatagatactgatgcatttcatattaccaatataaccaatactttctatgccaagagtaagaacggtgttaagagaatagtaaatagtgcaatgtccacagagaacaatttacttataagaagcatagctacagtaattttattcacattaacattattccctacgggagatgtgatgatgagagaggtacagagagagattgaagaagatgttattaataatgaagaacagtgataatattaataatattagaatcgtctagagcttctcttacttaatttccttattaatcggattattttccagacttttccatttcgctcgctttttctatataaagccactgctggttcgccctttttaacgattaacgatatgtcctgattttgccaccctttctttttgttcttgttttagtaactcaatcaactcaattaacaatcacaatggtcgttccttctatccaagctccagctccagctttcaacaaaaccgcagtcatcaatggtgtctttgaagacgtttctttagaacaatacaagggtaaatgggtccttttagctttcttcccaatggctttcacttttgtttgtccaactgaaattattgcttattctgaagctgcaaaatctttcaaggataaagattgtgaagttttatttgcttcaactgattctgaatattctcttttagcttggactaatgtcgctagagctgaaggtggtttaggtccacttaatattcctcttattgctgatagaaaccattccttatcaaaagattatggtgtcttattagaagatgaaggtattactttaagaggtatcttcttaattgatccaaagggtactttaagacaagtcaccattaatgatttaccagttggtagatcagttgacgaatctttaagattattagaagctttccaatttactgataaatacggtgaagtttgtcctgcaaactggactcctggtgctgatactattaaaccagaaccaactaactccaaggaatacttctctaaacacggttaattgatactttttagattttattaaagcaaattctttaacttatttatttattaatttatttataaaatactgtgtattttgaattaaatatatgaacatttattaaacattataatattttatccttactttcataccattgagcaatgtcttatcaacaacttcaattgtccacatcttcttctttgcttaattgtaaactaccaccctggtctttaaaattataaatttcaattccattttgcattattattggcattgataattcaaatttatctttgattgtttgaactatgtcaattaattccatatttgaatctagttcaatttcttcagttcttataccacaaactggacaattatcaattggtaaatattcttcattatcgaaaagaaccccattttcaccattataataacccatatctttcatatttggattacagttactaataaatttgtaaacttcattacataattgtccactaataattgcattagttgatgcaattgcaggtatgatatttttaacaactccctaatgttaaacttttagtaacaccttcaattccaaattcattggcacgttttaatgcagttttaaacatcttttcaacatcttcatcattatcataatcaaatatttcatcttggtaaatttcttcccaacctaattgttttgcccattcaatacaatgttctggtaatcttggagtattggctaatgtacataatggataaactattttatcaggtataagtgattgataacattggaaacatgcagttataccaggtataattattttaatactaccttgaaaaccttctgtaccaccatcaaagaatataattgatttttcattattactattattataaattctccatattgtttcattaatccatttacgtgcattaattgaatctaatccacttattataatatcaaatttttcataaaatgaatcttcataatcttcaattttaccaatataatattcaactttaattctatccttaacagctaaacttgcaatttcacatttatatttaccaacatctttatccttaaatagaaattgtctattaagattactcgatgaaattgtatccatatcaattatatgtaagtttaatggtaattcatcagatgctgtcatagataaatttttaagtatttcacaacctaatcctccactacccaatattaatatcgatgttggtgatggtataaatgtttcatcataatcttcatcagtgaatggtcctggtggaaatatcattacctcttatgactattcctattcataacattagaaaaagaaagtaacctattcccgccaacatgaaaattcatcatgataaattatcaattaacatacaaggcgtatttcaattacttaaagttaaatacttatatatggtcagttatataattctaacattacttctcattctaccaccacggaagttatgcaatgctttcttctttcttggaacactttgaactcttctccatgcctctcgtacatgttcaactcctattggtttattatcatcacttggttccatgaaaagatatcgacgattattatctttattatcatttaacttatccatccaagctttaacttttagtgcttcctctgtaattgtacaaaccatttcaaatgttaaaaatccaagaatatcaataacatcatcatttggtctactatctgtaatttgtgacatactacaccattctctaaatcttttacttttcctaaatgtaaaacttgcttgtctacattctgaccaatgaacatattcctgttgtgtcatatttttagttctttcatcattttgctttaatcttttgatttgtgctaaaactgcatccctttcttcttcattaactttttcatcatcaatattactaccattcagtcctccaattaatggttgctctgtaaacataaattctaattcccatggtaattttaaaattttcttctgtttagttaccattaatttattatcaccagatccaccaactgcttcttcaattaaattatcacctccacctgctgctatatcaccgttttcttgatcttttgcatttttacgaacatccttccatgataaataagtacgtaatctattaacttttgccttatcatgacgaataagaaagattaaatcttcaggtaaaattgatttttgtcctcttaaatgtgatgttttctgtgcttgtaacattaatgcaacaacttgatctctaacaatatcttcaatcaaatcagttgtacgttctaatggatcatttatttcacctgaaacaaacatcatttgttgaatttcaattctatacttatatcgatttttatcccttaacatatcattatatgtattagaatcaccccctgatatataattattattcttcactggacttccatcattatcattgtcgttttcatcaccatcattatcattatcgtcattatcgtcattatcatcgttattgttattatcatcattttggagtggtgttcgtgtaacatccagtttcttactcgaaggtctagatgttttcttagaagtaactggttttttacctgccctattactagtaactgccattgtttatattttataaagaaaatttagaagaagaaggttttggatctttaatattctaaatttttcaattacttaacgctctatctaaagttatattcttaaatttcttaacttaattaaatattactactttttcttaacgacatgtcatggattcaatcatctacattagtacttaagaaatccaaattcaaggcatttgtaataccaataaaaacaaataatgaaattcctcaattgttgaaggaagtttatacattagataaacatttgaaaactgcgtcacatcctacaatgtatgcttggaaaactgcagattctaattcaaattctagtaaaataactaaattacaaaatgttaatcaaggatttaatgataataatgaaggcggatcaggtcaacgaattttaggattgattgatagaatcaaattggttaatatattaattattgtttcacgatggtatggtggaacaccattaggacctgcaagatttaaatgtattagtgatgttgcaatggaagctgttaaaaacggaaggtatttcaattcaaatggtggtaacaataaatcatatactgattgtttaatgataaataaataacttgtgtttatatgattgattgattgattgattgtttttattataataaattattatacattatatttatagaggatattgtcttaaagagaaaaatttatagaactagcttattttaaaactttaccatcagcaatttctttcttttcaccgttaacaacaactggttgatcccaagcccacatgttgttaatgaaatctctatcttctggtttagaagcatctaattgagtgtaactgtaagattcccaatctggagcaacattgaaagctggaattgcatctttacctctaacaaggaaagcaccaacaataccattagcattgttttcaccatagacaacagcacaaccaaacatatatttggttgaagcagataatctgttgaagaaaccaccaactaagttatttgacatgaaagttaaagttaattcatcattatatttatattcaactttccataatgaccagtcattatcattgtagaaggtatcccagaaatatggtaatgcttcttctctagtctctttgttagagtaaactcttttccattcatcaattgcaagagctggtttacctaaaagttctaatggatgttttggtttcttttcttcagctggtgctgcttcagctgctggttttggagctgctgctggctttgctgcttgagccggtttagcttcttgtttcttttccttctttgctggtaattgaggtttaactggttcatcaacaaatttaagggtatcaaagaaatatgataagtatggagttttaacaacagtgctaatccatctcatgaaaacggtatgtttagatctccattctttaccgaaagttaaagtaaaacatctgtagaaacaagttgcaacaaataaatctgcaacagttaatctttcaccaactaaaaaggtatattttgttaatctttcttctaattgagcaacatattcatcaactttaacattagcggtatcaagaaccttcttgttgaatggaactcttgctaataagatacggataacatcagtaactgggaccattaattcagaggttgcccatgaaaggtattttaagacttgagccttatcttctaaaccaacacctattaatggggattcagcatcatgtaaactgattactataataaaagagtgagatgttagtatatttgttcttgggataataattgatattaattaccatcaccatcaccattcttaataatttctaattttttcagatttaaaatctcgacattatatttaagacagggataactgtataattgaataaaattctttttcatcacttaaaaaaagaaagaattgagaatgtaatgtaatgtgatgtgatagagtgctgcctgagtgcatattaatataacttttcaaatgtattatgggtataatgaaaaatattttttgagaaaaaaatgagaagttgaaaaaaaaattaattgaaaagttaacttaacaaaacatgtgccacactttaatatcaatatgattaaatgacttatatggaagaaatcaatgtagtaggatacatacagtagaataaaacagcaactgattcttgtaacttgaaaccgtgttcaccaatgaaagctggaactttaccatttgggaaggaagctgcatgagcagcatcacctctctttgcaagtttaacatcaaggttgaaagccttaactaaaccaacaggaagaatacttcttgtttcgacatcaccataaagagtaccttgagacatttttagtggattgtaggatagtttaaagtggaatgaatttaaaaagatcaagaagaaagtgtctctttatagctaaataatgtagaagtgagcaaatcgtcgaaaaaaagaagggaaacgagaaatgtggcaaaaaagacactttccgcacttaatttactatgaggtcttttctttaacccttttttcactattttttttaactattatttactatacagtcttaccgtcggaggctcatttagttcttattactaacatcgatatatctactcttcttcactttctgtaagtatctcgtagaagtcctccatggcattactacggcttccaaggagtgtttgactattaataacatcaaatgacttaccatttatatcaataatattgttcttaccccaaatttgatcaatgaatttcacatcggacttgctttccggattcaattgggtgtattcaaatgaatcccattcaggtgctgaactgaacgctgtcttataatcacatcctctaatgacaaaagctcctgttataccaatttgaccttcttctgacatataaacgatagtaactcctgaaataaatttaacagtttctagtaatctattgaaaaatccgctaattaaattatcaaacttaaattgtgcatctatttcatcattatacttataatcaactttccaaagtgaccattcctcgttattgtaaaactcattccaaaaatatgacaatgattgttgtttactcgttgaatgatcattcatataaatacctttccattgtttcaagggtattttagtatcgggtagtaactctaatgggtgacggcttcttcttataaacatcagatctatcagtttatctttctatacagtagatgatttttacaataagaatacaaggtacagatcctctctaaatttaattgcgtctatttatattgaatcgcttaaaaaacatattataagtagggattaattaaggacctccgtatgagtcacgtataagccatatatgctcaaattatatgggcagaggagtgttatattaccaaatcaattattagtctctcattattagtcacgagtggatctctattaccaactcatgtttttggttacaaaatattggaaaaagtaataaaatcttatttttaaaaatttattcaatcttgataaagcccgaattattactatactgacaaaaaaattaaatcatcgaattttgtgtctctgataatgtattacttttcagatcgatcttgtttctctcgtttctttcagtaaccacacaaatatgctgaaattcaatgcattaaagcttcacacatttgctgtaaaatcacaactcagacacttctcaaaatctctttcaaattacattgatttatcttctcataactccatcaaggatacaataaatttcattgactcctcatctaaaattgagtctgttaacgattttaatgatattattaaccatcatgccacaatactggactccaaatctaataaaacagaagaggaatataccgatttatataatttatcattgaaattatccaagttgttggaatcaacgcctgatgttaatgaagaagtcaaaaaagaaatacttaataatttaattgaaagatttactaaatataattatgcaatttcaacccttgcatttaaaaagctgttaaatgataaaactagtctatctcaaaattctataaatcaattgatcactcataatccaggaagagttgaatcaagttggaatttgtataactctcttaaacctgaaaatcaatcacatgatgaaatattagtttcaacaatgaagaaactattatttggtgaccccgttgaagttaaagaaaatttacatgctgttgaccttcaaaaacttattaagataatgaaattgtatgaaactataggtaacaaagatttaattgacgagtctctttccattgaacttgtgaaatcattgattaagttagaatgtactgctgtcattactcaaatggtaattccatcctcaatttttgaaaaaatcattagtgattcaagtattgaactaaataattctgactacctctatttttatgaagcttcaattaataacggtgtttcattatcaggaaattcattattaaagtcgtttatgccaatatccaaattacaattaacatcacatgttgaatctgaaaatttgaaaactttgaaatccactttaaatattgaaaccattgaacttgcaccattaccagatgttgttgatgaaataagagaacaaattttagaattaggattagatgataatcctagaatcatgcttgatttaattaaatctgcaggttttcactcaaatgatttacaaactgccataaattactttcaaaattatcaatttaaaatacctgatggaacacctgaacaaaatgatttaaaatctacattatcattagtttgtgtttatgattgtatttataaggaagatggtaaaatgatcgatgttgcagaagcattagttccacaatctccattacctgcttcgaataacttatcatcactaattctttatcatggttggtttggtaatacagataagtcttttgatatttacaatcaagcattaaatctatttttgaaaccacatgaaggtaatgaatcaaatagaggtatgttaattcaatcattaataatagtctctcttttaggtaaagaggttgaattatcaagattgatcaaacaaaaaagtttagaacataattcattagatgaagtttatgaaattaaaatcacaaatattttcaaagagtatggtgatatagtcgaagaagttaaagatgatgaaggtgaatttagaaaatctttcaagaaaattattcttcgtacaattatggaaatgtctccataatctcattcatagtaaatatcttactgatatatagcttgtatataaactttaatcatcgatagaaaaatacatgctttcatttatcatgattgactatcatgaaaaatcggtatttggaaaaacgcccgatttaatttttcaacattcaatctcagcaagaatataccacttttctttatcttaattctttaaacatacaataaaccaaaatgttagggtttaaacatacaatccaaatcatctctagacgatatatacatataacgacaagaaaatgtatggaattacccgaaaaaaataaaactattgataagtttgatttcaaacatttcacacatactattgaacaagttaataagtcttttgataatttaatcaatgaaaagataacgatcaatggttggatcgaaggttcgcctagaaagatctctaaatcattagttttcgcaaagtttagagattttaatggagaattcacacaaattgtcactaaatctgaggaactaagtaaattattgagaactatgaagccagaggatgcattatcagttacaggtacagttaatgttaaacaacaaaagaataaagatgataaaaagacatgggaacttgctattgataactttcaagtattgaatcaatctaatgaaaaggcatcacaattagattctttgaaaagtttaggaaatcaatttcctccagagtacagatacttacaattaagattaccatattatcaaaatgcattaaagatgagagccagagccgcagctattacaagagatgtattaaacaaaatgagctttacagaaattgagactccattattgtttaaatcaacacctgaaggtgctaaagaatttttagttcctactcgtaaaaatggttatttttatgcactaccacaatctccacaacagtataaacaattgttaatggctagtggatttaaaggttattatcaaatagcaaagtgctttcgagatgaagatttaagagctgatagacaacccgaatttactcaaatcgatatggaaatgtcatttgctaaaagggaagatattcaaaaagtggttgaaactttggtgacaaatgtatggaaagatataaggaaagttccattgtatagagtagattgggagaatgatgggaaattagttgatttaaaagaaggagaacatttccctagattaaactatgttgatgcgttgagtaaatttggtattgataaacctgatttaagatccaacttaacatttgtgaatgttagtgagtgttttgaaaatgtcataacaagtgatgaattcccagtcatcgaggcatgtgttttgaaaaatgctttaaatctagttgatgagcataccggtaagaagattaaattaccaaaagagttatttgatgatttagaatataaaggcagaaaaccatttatcttcaaaataagaaatgcacaagaacttaatgaatggacaggaaaattaccaatgaagttaaataccccaatagaccaacttaatattaaattaaatctctcaattggggatattgttgccgttagtgacagaagtgaacttacatatgaaaatccaacaccattaggtagattcagacaattatcgattcaacatttccccacacaatggagaagagaaatcgcaaaaggttcaaccccacaaaaagacttaaataatatttttgttgcagcatggttagtgaactttccattattcagtccagtagaaaatgatatatcaccaaatgaaaaaggctatccaagttacaattatgagaaatttgaatccacacatcatccattcacaatggctaaattagaggactacgaatatttagcaactgaaccccttaaagtcaagggagatcattatgacttagttattaatggagttgaagttggcggaggatcaagaagagttcatgatgcagaattacaaacattcatttttcaagaaattttgaaaatcactaaacacaaagaacttttcggtcatttaatccacgctcttgagagtggatgcccaccacatgcaggtttagccattggatttgatagaatgtgctccatgctactaggatcatccaatattcgtgatgtggtagcatttcctaaaacacaagcaggatctgatccggtagtacaatctccaagtcaagttccacaaaagacattaagtatatacgatattgcagtaataaattcaccagaaaaataatctaatgagaaaagagcttgtaaataaattaaataactatttatagactgtagaaacaatccaaccctgatacacacagtgattttttttttgaccagatgcattgctcatctctctcaaaaagaaggttcaaaaattaccggaaacatacatttgtggttaagcagccacggaacccgcgaaacctactcttttgggacactctacattgaaaaattagccgacgaatactgaaattcgtcgcttctatggctgtatttgggatttgccaccggggcatttaaccttctgagcctcgtttcaaatccttaatttgggtcttttttgattcatttatcaacaactcgctcggcttttatttgagcacggtcgtcacctttcaaaagaaaccactagatacttcatcggttgatcaagtgcctcattatatccatatttgtttgttgtattaactactttttgtctattaataaagtcgacgaaaaataatataataaacagcgaatttgagaaaatttgcttacaaaatttggtgcattttgattgaatttcttaaataacttctagaataaagttgcaaagatacagttttattagtttaattttttgattatttgaggttataaaaacaactaacttaatttgcttttacatttgactcaaatcatgatagtgataattaatacattggcttgttattgatatttatttgcattgtttttatttaccatttctctaccctcgcccgttgtctatttttacattttttaattttccaaagagcagaaaaattagttatcattacgtaacaatttgcatacaattaagctaaaaattaaaaacgttttgggtaatatttgagataagagacatcaaaagatacacttaaattaattcaattatatattttttattactgttattaccattgaaatattatctatcgacaaaaaaaatctaggataggtaccaaattcagggttagataagatcagctcagttcagtcgtaagtattttttttcataattttttccaatttattgaataaacactaattttattattgttattacagttcatcttacccataatctaattcaattaaaaatatgggccctgtatccaatgcaggcgcacgttttaggcagagaaaaatttctgtcaaacaaactctacaggttataaaacaaagtgatattccagattttgaccttgaagatcaacaacgtgaactccaacatatagaaactggtgttgaaaaaggtgaagaagaagaacaccacttgcagcaagttataaatgcttctgctgcaaagtttaaaggtgctaatgtcaagcaagtttatattccaacaccagatgcatctagaatatggaaagaagcagataagtattattatcaaaaatttagtgagccatctgagtacataaagttttctgctgttgttgaagatacatcaggatgtcaatataatatggacgaaagagatgatgagtttttacaaaaatttaataaaaatttaaccaaggaaaatcaatgtactgaggatgaatttgaaattatttgtgaaagattcgataaaataattgatgaaaaacaaccatttttaacaatggatcctcaacaaattttatcatttgatgaaataaagaaaatatcattagatccaaatagtataaagtacctaagacctaatgaaattttagctaaaaaattaaatattccaaaattcaaaacattatatgatgctgattcatcaagtggtagatatcctcgacctattgatcaattgattgagaaatttggtgcttcaatttatgaacattggaaaaatagaagaattgaaagaaacggtaagccggtcttcccaacattgaaatttgaagatccttcacaaaaagatgatagcaatccatatacttgttttagaagacgtgaatttagacaagcaagaaaaaccagaagaactgatactcaaagtattcacaagcttaaagtattatacacagatcttaaaagagcagaaaatttattacttttggttggtgaacgagaattgaaaaaacaaaacttattagaagttaactatgaaacacttaaactcagaaaagaattcaaacagcttaagagagatgctaatattaaaattgatgatgagttgttatatgataaacctaaaaagaaacgtccaccaatcggttatatacctccacctcctgtacataagaatgaagaaaaatctaaaagtaataataaaggctcattaccatcaaacaataaaaccagcaaaacaaagattaaagcagaattatcatcttctggttctaataaaaaatcaacatccatggaattatctaactctaatgcccaaaccaataacaataataatatcaataagaacaacgaaaataatatttctaataaacttcctcaagctgttatacaaccatatgttaaattaccccctgccaagattccagatattgagctgactactgttaatactgttctaaaagataaactagaaggtatcaagaaggctgtttctgataaattaatcaaaaggaaattacaagatgaaggctggataaattttactgatgatccatataatccatattttgatatgtcattgaatgataataatctgattgaagaaaaatctcatataccttatagttcgatagcttcatcaatgtttgaagttgaaaattcaagagaaattaattttagtcatatatttaacaataatagacattatagtaataatgattctgaaatcgtcaaaattaacttctttactggtcaagttgttaaaaatgataggcatacatatttacctgagttttatgatgcagttggtgatgaaattcctaatacaaaatttggtagaaccaaatcagaactttacgaagagtttaacgaaaaaaatcgttttaatgtttcggaagctttattcaaagttagaaagcgtcatggtagaggtggtcgtatttggatggatagaaaacgtacagccgatgatgatctatttgaagaatatttaaattattctgattctgaagattccgataatgatgttagagttgatggtatttcaaccagcaaccaaatacttggaaagggtacatttaatcatgaagaaaagttatttgatgatggtgagaatattatggatgtggataaagatgacgatgtttctgaaagcagtccagtaaaacctaaagtggttgaaaattccaaaaagagaagaaatgcatatgattgtaatatggatgctaagaaaagacttaaatccagattcatgtttgattcggacctacctatttctaatcccttagatccttccaaattaaatcaaattggaaaacaaacacaagctgtaagatttggttgcatgttattgagcaaggcatatgataatatgcatcaaataagacaaaagcaaattctccatcatcaacaaaaactccaacaacagcaacatcaacagagagaacaacagttacgtgaacaaaaggaacgtgaaagacaagcagtacttgcccgtcaaaacctaaataatcgttccaatttgaaagacaaaggctttgagaatggaaataagatggataaactctcttcttcattaaccgcatccgcttcaacacctaagaattccaaaactccaaaagagaagaaagctaagaaagaatctgattctaaaaaacctaaaatcaataagaaaggtttaccaaaagagaaaaataaaaatagcatgaatgatatttcaggatcaccttctgtaaaactcaaaatagagaatagtgtcaatggaaacaaaccagctacaatttctaatcctaaggtggataaagaaaacaaaatttagaatctatttctttgtttctttatttatctgtgtatatttttacgtgtttatgacatttttgtatattattttatagtaattgaattttaattcatttattcttttagaacatattctatgtcgataaggtatacaaattatatacaaagttgcttaataaattttcagtttgcattggtcatacttttggagtagctgttgatatatctgacattggcgataaagaagtaatccttccttcatcttgactcggtatactttgaatactttgtatactttgaacgtttgaaaccccttgttccagatctttaaaagtgtttgttattcgagaaggagagttctttatttcaatagctggttcaacgctatcgagtttctgtgcttcatccttgagcaaagattctctccagtattcaaccatatcactgtacaacatattcgtaaaattttgatgtagaatatcgactctgaatctttcattttgcaacaatgtaagtatgtgaaggcaatctggatacactaaaaatcttgcatactctggttgtttccaataattcaggtaattaatgtagttcagaaaatctggattcttgaaatatccttgttgtgcaagatatgagaggtattgcgtattagctaatgattgaacaaattccagttcaatttcccatcttgttggtagttcatcattttctgaaccagaattcatagagtctggtacagttggaggtggtatatctgtcatgtgtcgttgcttttggtaggaaagaaaaaacagagaactaggaattgaaaacatgaaatttttaaatgttgagatttctatcaagtcatcactctacaattgtacacaggtctaggatctaaaataaagttattaaaagaggttaacacatagataactgatagatctatatcgtcatcaagccataaccaatgtttggtacccgttccggaaagatttgtaacatatgggaatctatcaatttcaaattcggcagattgattaggctcccaatgagaatcagtcttcattttggtatattcaataactaacaaatctttattttcatgattgaatcctaaaatttttttgatattaatgtaggcatatttgccattaatcttgacttttgcaaatttcttacccgatgttaaatcaatggtttgtgaacctacattcaaacaattataactagaacatggaacattttgaggatcttcaattccaaattttgttgcaagtgagtccttcaacgatgaaaataaagataactttgtaatcttctttctatcatcaggtacataatgacgatactttccgtttcccctttgattttttattgtcatatttaccacggtattgagtggatgtttaaattgtttaaattgtaaattatcattagtatcaaattctctacaataatcatcattcattccatcaatactcttaaatgggaatatcatttggatatgattattatatctaggagagcaccaagtatctacaaaagaaccaacactagtccacttatcaaacatatgaagtactaaatgtgatgaaagaccaattaaaggatcaaggaaaggataataatttgccatatattggattgaaagaactagttttttgaatgatatttttaattttggcacatcttcaattggaacgtcaacacaaagaaaagcatcatataatgattaaattcaagtagtaattgtaaaatcattccatagttagattctaatctgaaaacatctctgaagattagagggagaagtgacatacaaagaaagatgttagaaccatccaatgatgcatatttcctaaaaggatcgggtctcaaaaaattgaaaaaataaccagtgtcagtaataatacctagttcatcaactgcttctttgatatcattaacatgctgcatatgaaggtaaaatcgatgtgcatctaacttttcaagtgtaccttctaaaaccaatgcacagattttagtagtgaataaatcatctaaaaaaagttgctttaaatcagggaaaatattattcataaaatcataatccttcaaatcagtgaagcatgaacgtgcttttgcgattgatgattcaccaaaatcctttctgttgacagcatcccgcaattcctccgttgtaataggttggttggttttagttacaaacttctttggcttttcttggaaatctgtatcaaaagaaccgaatctcaattcatcatctgcaggatccatagcgttcttacagagagagcagtgtttaacatcgggagcataatttgactccaaaattgcaggtaatctcatcggaaaggaagtaattgacattaaattgataaataaagtatattccacagaattttttgtcactttgaaaccattcgtttgtaaatccgttaaatcaagcatcaatacttttaacatttcccttaaatatcctggagcattatcctcatatttgaaaagagttgatacaaatgttaaactctcttcatctctcaaaattggaggaaaatctagtattttaaaatatgcattgtagtaagtagcaggtttaccattttccaaaagtgtgtaactttctaaaagtaaatttaagttaaaaattgatgattttgaagactcaatgtttatacgacgtctatctatgttatgaatactatcaagtaactcatcattcaaaaatattttggccagtaatggtctaatactttcatatcgtccattcaatagagtagaagttgaactttcatgatcacaacacattttcatttcaccgtgttcattggaatatgaagtgtatccacaaagacaatatttgtaatcaaatccagttccaactgcatcccatttatctttaccccaattcaagacttttttgaaactaaattgttcattattaactgggaagagactatcaatatcagacttagaaaataccgttggattcttcataatggccgatattagacctttgcgataattgtcttcttggtttccgtgtgtgcataattcttcaaattttatttgattaaaccttacttcatgcttgatgctcattgttatttatactgagatacacacccagagaatcgttgttgaaaaatcactagtaaacaagcttagtgatcttttagtgaagaaatcgtcgctttattatgagacaatgcagaaacatgaattttcaacacgctgaagatgcatggtttctttcttttctttgggaaatacaagtttatattatattgaaatattataagttatatcagaaattagacatgtgtttataaaataaggtcattataataaattaaattaaattaaattaaagtgaattaaatcgagtaattagaaattagaaattagaaataagaaatgaatcattgattgaatcttgtttttgtatatatattttttgaatatttttttgatatgaatagaataattattaatgaatgatttgactaaatcgttgttaatgattagattaaacaaattcaattctcttttcatcatctgggacactccaagaagctggcattctgaaaatctttgcctctggaagaggaccatatgagttaaatggttcagataaagcatcatacattgcatagaaagcacaagctgaggtaaggaaacagaagacaccagaagcagtttgacaacctttatggttaccaaagacagcaatagtgtataataagaagaacatccataaacagaacattaaaacgaataatggaacagttgatttccaagttgcagtccaaaggaagaaagtgaaaacggtccatgaagcaaggaagatacccaaagcatcacttaaaccaccatctgaataagctgaagcaatatcaaagaatggagctaagattgcacctaatgacataaagaatgcaccataacataataggaaaactgaaccaaataaattattatcaacaactgcccaaataccggtaataatttgaactaaaccagatgagaagaataatgaaccaactaaagcagttgaagatggagtatgtcttgcacctgcaatgattaaacctaatgcgaaaagagtagttgcaacacaagctaaacctgcagcaacagaggttgggaaaggtctgtaattaccagttcttttgtaccaactagttcttaaaagaccagttcttggtggatgaatttgaccatcatagttatatggagcaccttcatataagtttggataatttggttgttgaggaatttgtgcttcttcatccttacctggtaatgaagtttcaggaacagcggtgtttgttgaatggtcgtcagacattattaattaaagttcttttttgatttgtttgataaaggaaaatacaattaatatataaatttaaaataatacaagaattagagatagttcaattataattatatggggatattagtaccttttatatactcatcagaaattaaaaccgttggcattataaactcaaaaaataaataactcaaaagtgccctctatagaggattcaatatgtcaaataatcaggtcacaaggtaccatcaatgagacaatatagagttctagacgattgaagaagttgaagttcattgagtcgatgatattgatataaaataaagtggtgttaccattaaagccatgtcaataaatctaaccacttttcgtgatgtaatggtttctggaaaaaaatattttttatttttcaaaatttttcagtttctgtttgcgttaatgtttcatgtaatcaattgatataatgatcatgcatcttttctacgagtcagggtctaattgtatcagatgtcaacccctcctaaactattacctaagactgtattaccatttgcaccattgagacatgatgaaagactacattacttaaacttactctacaaacaatacagattagctaatagccaattccataataataaagattctaataatgccctaatagtgaaaagtgtaaacaaagaatatagtatttctaaagaatgtaaatctaaaatggaatatttacacgtcgttaaaaaaataatgtttaatttaaaaaagtacggattggaagaaattaattctcacacaaaagagtcttcatcaaccttatcaaataataatattaacaatactaataataacggtactatccctaatgcctcaaatgctgtaactgaaaattttaattctaatgaattaccgaaaactgttgaactcctttctaaagaaggcaataaaactgacgatttcaccaacatttacaatgaattaaaagatctttgtgttccatttcatcgtttaaagagacataattatgtaatggacattccttctgattctaaaaatgatcacaagttccaagatacaataaattgtgctcattgtggtactatctttagattgtgtgatatcaaaaatatagttaattgtacatttcatcccggaaagagaataacgacaacttatgaaaatttgaataagggtaaaaaaatttatggtacagattatgcaagtaagttttattcatgttgtaatgaaccaattggacaatccaatggatgttctaagttgaatcatcatgtttacaaatttgataatccactagatttacataagagtaaaccatttgttaaaatcaatcaattgaggaaaaaactagatataaaggaagattcaaaggcaaatcaattaagaaaggaaaaaataaaggcaattgctcttgattgtgaaatgtgttatactgacaaaggttttgaaatgatgaaactgagtgtaattgattttaaaactgagaaaaaacttattgattccattattcatcctgatggtgaacttataattgatttaaactctcatgtttctggtgttgattccattccaaaggatgctcttacatttgatgaggtgatgattaaattagcttatttaactgatgaaaatacaattattgttggtcatggtttagagaatgatttgaatgttttaagattgatatatccaaaaattgttgattctgctattctttttagtgaaaatcaagttaatgttagaagaaaagatccgttaaaaaaactagcatggacatatttaagtgagaatattcaaggaaaagagcacgattcattagaagatgccttagtaccgactagaattgttaaaaagcatattgaaaaaatccttaaacgtaaacaaatgaacagattatcacaaagataattacactgtcccgataataatgactttctatgataatattacattttcttttagatataatttacaaaagttttaattaaaatcacaacatgtattgtgaatatctagttagtccatcaagaaacttggttagatcttcttttcttaattcaataatcgcactttggaaactgtccatacgtgcttgaatattaatttcctgtgtaaccttttcaaataaaactgaaaatgcattaagtataaccttttgttccttttctttctttttattattctttctctttcctactctctctcttctcttcttcttattatcatcataatcatcatcatcactatcaccatcaccatcaccatcattaccattatcatcattctcttcttcttcgtcatcgtcatcatcaaatgtagcacgagatggcaaaccacatatcaagtacgtttgtgattcactattataagctcctattagtagaggtaataaaccttcttcaagctctgcctgtatattaagaatccaattacctaattttgaaagaattaaaggattttggaacatttgtgaaccattaccaaatgaagtaatatcaacaactctatcgtccttaattgaagaattacttttattaaatgttgaatcactaaaatttgattttgtaatactggaatttgaagtaaatgattcatttaatataacaactttaaactttgattgtgttttaaccatgcctttctgtataatttcactacctttttcaaatataaattgttgttgaaatttagcaatttccatacctttgatgatatcattatagttatttagagagtcataagcacgccaaaaactttgtaagaattgctcatttctccttctttcattatttttgattttatcatcatcatcatcatcttcctcgtcatcatcattatcgttgttttcgtcatcatctgaatcatcaccatgattattctttgatttcttctttttcttagttttattagctttttcagcattgcttagagaaaacttattgtctaaatatccatattctaataaagcttgaacagattcaacataatcaccacttgttattgatccatgaaaaccataatttcttttaaatccatcaattatgatatcctttaaattaaatttaaaactctctcttttaattaaatcatcaagtttctttttcaattctagatcaatataatgccaattttgattagcttgaattaatgatatacccattcttgcaaacatagttttcagcaatctgccaccttcattagtgtataaatgacatttagagttaatataacttgaatagtaaaatgaattatataatgtccagtgatgtagtaaaaacaatgtatactccttacaactttgtaaacttaaattatcagctttcttagaaatatttgcatttgataatgaaagggaattagttgatgtcatctcagatcctctactattacttattgaattattacttgtagtataacttcttaaattaaatgaattttcatcagattgtaatcttttaacttcatcacgtaaaccagggtatgttaattgataaacttgtttataaacatcacgtaatgatctactaccaataattgctaaccaaaggaaatctaaatttatttcaccaatagttgataataaatcatacatttgatgtgatgatggtattgaaattgtggaaccttgttgataatagttctctattatttcttgatactcattaatcaatcgtttttgtttcttctttgaagattcttttataactggagattttcttttcctttctaatgaatcttcaagatctagttcatcatcctcctcctcattattctcttcatcattatcagtcgccaaatcttctatttcttcctcttcactttctccttctccttcttcattactatcattatcttcaacatttattaaataataaaatgcttccctctcgctatccaattcagttgttgaattatcatctaaacagcaaatcattggtgaagagtataaattatcaagattccaaggtctatgaccatcaataacatatattttcctatttaatcttatatctttaagtttagcttgatcgattaaagtttgaacatcattaggattcattgaaggatgtaaaaaatcatttatgtcaatttccaaaaaagtttcaagatctgctgttgctccacaacctattaatattatattttgaatttctgaatctaattttaaatactttttctttcatatcaatatacccaataactggtattaattggaagacgataaactgagttttaaaatattcacttaacattctagctgaacaaattgcatcaatattgaaacatgatacaaatatggcaagtttacaagtagaatgtgtcactgaatctctgcaaacatttgaaaactccctatagaatgtctcttgagttatgatcatccttgttatcaaaagttagccctattatttggtacttctccactattaaaactgtttagtataatatgtgaactcaattgctagagatttgacttttcgtgattccaaactgaaatttcaccaaaatttccatgttttacgcgtttctccctaagagaaggaaaaacactgtgaaaaaaactatgaaaattctttgaaatacaaatagttactaaaattccgagtgtcattacgtaatcagttcattattatacacaggttaactttataaaaagagagagagttaggaatagaagcatggtattggtttaaatagattataacaatctgaaatcttgaagataatcatgtaatttatgcacagatgaagcttcattccaaataatgtaaggttcagataatttgctatcttgtaaacgcatacaataaagataaatttttgctaaaattttaaatgtatagagatttggttgaattgcattaatttttaattcatctattaaatctgaaattagtgataaattaccagttttggaccatgtttgtatgaaaattgaattatatacatcaatatttaatccaaatccatataattcaattgattcatgttttttaatataattaactaataattgagatgattgaaatgcatcgaaatcaaatgtaagtgagtttagacaataattcaataaaactggtaatgtttttctatttactattggattaagaggggaattttcactttgctttttgatatcttccattttatatgattttttcttaatattagtagaggactttttcaaaaattcttcaattatatttgatttaataaattcgtaaaattcggtacttgtattaatatttttatttatgtatgtaagagttggagctaatgcttcaatataagtttgatttgataatgaatgcattttatattgagtttcaagattaattggacctgaatcttttataaagaaagataatctatttgaaatttttggatcatttgtatcaatttcatttgaattatttatattttgtcttttttgtattggtgattgaaaattaacaaaagtttctaaagatttaacaacaccgactttatttgtttcctttgataaataatcgaaaacttgtttgaaagacttttgttcctcaaatgatgtaattctagtattatttgattgtgagtcttttttcaatttttcaaaatcttcgaaaaatgatttatacaatgatttactgttattttcttcaggtttgccagtattggtattagtggtagatttattgagtttaccagttgtgattgaatctattatggaaggggagctgttctcaagttcaccaaaagttttcccaagttttattggtgaggatgaatagtttcttatcaaagaatgtgatttcactatacgagaaagcatcgttgatgagaagtagatgttttaatttgatatttttataatgaatatccaatttggaatcaaaaaaattcatgaaaatttttgaataaattcatgcatagtgtcagaatttgcgccaaaatttagtcacgtgaatattacataagcaaacaattacgtgatctgacataattttgaaaaaaaagagcggaaaataattaattttccctattaagaaaatattaaaaattgtacgattttcagacttaaaaaaatttagaacatcatcagattcacaatttaaggggtgtttttcatattgatgtagctgatttattttttcagtatacactcaattgatttatgcagtttatgtataatttatatacaaagtttagtggtcattagaagaaaaactggagtcaaagtagtaaaaatcaatgaattggaatggtgtagaatgtgatggaaaaggcacaataaaatgagccgccaaaaaaatttataaaaataaattctctcataataaatttattttaaataataccgaactatccgacgtttccgttcggatcggagtcgactgatttccattccattcaattccgaaactatgtagtaccggttagggttatcttcatagtgagtatacatgacagtgacagtaactcatttcatcatattttgatatcagtctataactcataacctagtactacatgtacaccctctatataactaatatgatctataacattgttgaaccacttggcgaaaaggagatgtcctgaaaaatttcaaccgttttgacgtaggctcgtcacgtatattataatttttccaatagattctatagccggaaacaccggacggtatatgaaacattaccaaatattataatattataaactgtattagtaaactttcttcattaaattactacaagaggcaatatttcaacaatgattttagtcattcgttgccctttctgtataacgtttgcgttaatttaatcaaattggaatgattgatcactttgttaccactccactcgttcaactataaaaagatcaaatattcctttataagttgttatctcgtgcttgatcttttcacttctttcaattctattattttctttaatttatttcttttagtaacaaacaatctcacaaattaaataatgtctgaacaagtctttgaaaaaaaatacgtctataccgttttaccaccaagaactggtcttttaagaaactcttggtataaaagatcaaatgaatggagaccatatcctgcatcatgttcaattggtttagcatttattgcagtctctctttttgttttaggtttagtcctttgtcatgctagaggtgtccaatctcctgctatcttaactggtatgttcttctttggtaatggtttaatccaagttattatgggtatttgggctattgttgatgataacttatttggttcaactttattattatgttatggtggtttcattatgtcatatggtgctgctgcatcagatttatttggtgttatctcagcttatccttcaacaactaattatagttctgctatgactttattcctttcagcttggactgtctttgatttcttccttttcatgtcaacttggaaatcaactatcccattattcgttttaaccttctgtaaatggttctttatgttattattaaccattgctatttccggtaatcatggtgctgttagagttgtctctggtattttctgtttcatcacctctatttgtgcattctatgcattctatgatggtatgcaaacaactgcttcatcttacttaccaatcaatgagccagcttggttaagaatgccagcaggttacaaagaaccagttgatgaagattacattgccgtcgtttaaatttagattcatttcaaattaaaacatcaaataaaaaataattaaacctaatgtcattactatctaatctaatcaaatttaatgtcaaatataattaacgcatatttcaagtctaatattttcaattcgttcactatgtcacaaaattaattttaattcaatttaatactcttttttaacattttcttaattatgatgatcccctttttatttctttaacgtttatgattattgaaattctttttgttatgaaatgttttattattattaccaacttgttttatgtgttacttattacctctaatcactatatatttttatttctgatacctactatttaatatcttatctaactaattaatttaactataataaattctaaattttaaattctttatcgataacgtactattaagtctgctaccattacaaaatccagcagttacgtaatcaccaactacttaatcatagacgcgactttacatgttactagtatttcaagtttcgatgaagctgcacagtattgcattgaatgcaacatatagtacaggctcaataataagttaagtgtatttctattttgtgttatacagggtgtattttttatataagttttcgttatgatatgtacagaaaaaaatccattaattaatttttgaagataattaaaatttgttttattttataattctttatttcttttcttgtttatgaatcttaggaagtaatctagcagcatggtaatttaatgtaggttttggaggtggtgcaaccttaataccctttgccatacatgcctttaagtcagtttctaaacctttacatgcaatattaccttcaccattggatgcccaacaattaagcatttgtgacataataactaaacatggattagcttcttgtttagctacactgtttttcacacgaagacgaggaagtggtggaaccgctggtctgtgtctaactgccattgtctgttagtataaggaatgaaaatataattagttgtaatactaaactaacatgtcgagttttttttcatgttgcgaattaaaaaatttaaattatcactacagcttaaatgtttatttgattactctcaatgtatccgatcgttgctttttatcgtaaatttaagcttccatttccgtacattatatatacttagatgaccatgtctgggacaaaaaggtcaagaaatattgttgttattggaatagatggggcaaataatatactgaaagggaaatctaacagatatgaggaaattattggaagtgaatctgaaacaagtagcagcgagagtgataatgaaggagatagtgaagatgagaataattcaaagaaacagaaaacatcgcctagcattaaccctgaggaaggtttaagtgtacagaatgatgttagtcaacctgtggaaataattgatagttcaagttcctcatcaagctctgcaaattccagtcccaaacctacccaaccttcatataatgatgtgcccaataaccgaaattataataatgatcagtatgaaaataatagtgatagtgatgatgatagcagtattgaagaatttcaatttgatgatgttgatccagaggatgaaatagacttcgatttttactctggtaaaattgatctaccacctttgaaagatcttaaagttactaaaaagttacgttcaaaagcacgtgcatttttaaaaagtgaaggtcatgacaaatatattgatcttttcctaggtcacggatcacaacctgaagctattttagcttctgctaaattattaggattcgaacctcgagttaaactagaaactttgttagcattacctttccaagattttttaaatagttcaatatcacatttgcaaaattcaattaataaagtctcaagattaagaacgaaattatcagatttccataaaattgaacatttgaaaaatgctttacttaatgcaaaaaatatattggttttaacaggggcaggtatctccacttctttaggcataccagattttagatcttcaaaaggtttttattcaaagatgagaactttaggtttagacgaccctcaagatgttttcagtttagaattattcaagcgtgatccaacaactttttattcaattgctcatatgatattaccacctgaacattcatttactccattacatgcttttataaagttattacaagataaggggaaattattaagaaattacactcaaaatattgataatttagaaggtaatgtaggaatattacctgaaaaattagttcaatgtcatggatcttttgcaacggcaagttgtgttagttgtaaatataaaatacccggtgaaacgctgtatcctaatttaatgaataaaaaaatagcatattgtccattctgtgaaaatgaaagaaaaaatcttattagaaaatttgaaaaaattgaagatgaaggtttaggtaattttggttcaaaatttgagactattaattcatttggtgtcatgaaacctgatatcactttctttggcgaaaatttacctgatagatatcattcaacaattaaagaagatgttaagagttgtgatttattaattactattggtacatcactgaaagtagcaccagttagtgagattgttaatagggttcctgatcacataccgcaaatattgattaatagagatccaattaatcattgtgaatttgatatagaattattaggatattgtgatcaagcaattacctggctttgcggtactcaattagattgggagataaaacataaagattataataaaattttaaattcaggtctcgaattagaagttattgatgaagatgatggtcgatataaagtaactgatgcagatgaacgtattaaattatctttgaaaaagcttgaagaaactcgtgaaaaggaaacttcaaacaaagattcaaatgaggattcaaatgaggatttcaaatgaagaatcaaatgatgctgaaaatcaataattccccccttttataaatagatctatagacttttttacatagacagtagttgatctacaactgcataatattattatctactatgcttcatattatctgatatagatatgaaaatccattagctgtagatatacaaatcaagtctcgttaatattgacttattgagtgcgctggggaaatttaaaatcacaacatcaacatcaaactcaggatgatctctttttggattcattatggagtttacattttgcacagaagtgtaaagttacgagatcaaggcattatgtcgtacagtaaacatccatttgcacaaccattgaatcagcgtacgccaccattgacttcatcatcacaatacacctccacaacagcgaatagaaatgggacacccaattctagtttcaactccaatttcagttctaacgcttctgttccaagaaagaatgcttttgaaccaggtcatagacctatgaattcaatggatttggctagacaatttgaagtggatatgcgtaaaattagacatgacttatttcaaaatagagatattgaagaatatatttcacatgttccaattgttgaagattcacgaagtccaagttcaaggcctccaccgaatagtccactttctaataaaaaggaaagatatttaattttatcaaagaaatcatctggtagaatgatgctacataaggctaaagtttcatctactaacattttccaaattggtagaagttgggattttgatgaattaaaatcaattgaattggatgaccagattcaaacaggtctgatagtcaaattgggtaaattatattattgggaagtacatactcctaaggaaagaagaatttggacaaggactgtcattgaacaatatatgagatataataatggtaaaattcctgaattaattaattgttcaattgaatatttccatttagaaggaagtatacgaatcttttcaaaaagatagtaattctaaaaataaaaagccagtacatgtctttaatggcaataccaggatgaataacgtgccccaattaaatatgaaacaaccaagtcaaccaaataatccaatggctacagatagtaactgttcaaaaatcattcatcaatcctcaacgttcacctactaaatcagactctccagatataacaacatttagacaatctctaggaagcccatcaccaataacaggtccaacatttggtagtaaatcggtaacgcctgcagcatctgcagcactaaattcaacagcggcggcattaacaggcggtgctattgcgagctctgcattggcatctacaggggcagcgcttgctgatgccgctaatgctaaaagtattgcaagctcagaaagtgataataaagccagattagatgctgaaagaaaaaaatatgatgaagacaagataaaagaggaagaagagaaaaaagcagaagcatttaaaagctagaagagaattagcattgaaaaaaagagcggaagatgagttacaaagaagaaggcaagaatatgaagaacatgcgaagaagcaaaaactactagaagaagaggaaattagaaagaagcaactagaagaacaaagattagccaatttgaaaaaacaggaggaagaagagaaaagaaaacaagaagaagctgaattgttaagacaacaagaagcagttagaattagagagacaacagttattgaaagagcaacaaaagcaaaaagaggcagaactattggctcaacatgtcataccaccacaaattgcgggaatagctaaacgtggtgctccatctgcagctctatctgaaacaccaagtcaaatgagttttgagtatggtgatgaaacaaaatttcaaactatgaatcaatcatttgaaagtgcagtaagtagtgatctggatagttataccaagggttatgcaagtaatggtgaagaagaaacagcgccactcagtttgaatttacctaaaccaagagctaaagagacaattgttgaacaatctaaaccattgaatgcacctacaatcacaacaacacttgaaagtgacgacgagattaataactatcgtaatactttaaccaacaataatttactatcatcctgaacttcgatcaacttttaacttcaaaggatcatttaaatgcattagaaattgagtcagatggaatatctggaaggccacacgcaagatcaagagcattctctcgtgtttcagaaattaaagatgatgatatcgactttttggaaatttttgaagaaattggttatgacccagtaaatgatgattctagcgctatagaggctaagatattgaaagaactagataagttgcaatattctaagattagaactttaactgaaacaactaatgttacatcagctttgagaaccacaatttccaatgcatttaagagttgtgatcatattgatccaatattagtctttatttggtattgagttgtccacttttaaagatgacgttgattttattgaggaacaaggtcaagggttactagttgaagcaacaaatgaaaaattactaatgaatgaattgaatgaaattgtacattcagttgaaattcctgatcttaagctacaaaaaattatctcacctgatattaaatttggttaccagaattctgaacttggagaaaactttgtatgaactatataatgctttattgaaaatcagtgatcaaaatgatgatagcaaagaagaaaatgccagtacagataacttatcaaatctcaaagatgaaagcattgcaagagaaaaaacatacatttgaaggtgcaaaaaacaagtttatcacaaatttgaaaaaatcttcctctaagttatttgaatccgtatcactaagtttatcttccaaattagcacaaacaaactatgcaaactttgataatgaatttttgaaaactgcatttttagaaaaatcttcatacttacttactatcagtggtctaatcttatttgttaaaaacacgtcagttgaggattatcaatacattttaaattcttttatcaatgccttcaaaccattttttgaaaatttaataaccttcattatgaaggatttaagtacagaggtttcactattattatccaattcgtttgctttcttagcagagcctgctactattattgatgaagactatatgaaattcagatcttctaaagattttggttcaaataaagttaacttatttactaaagatacacccaaagccaattcaaatagcacatttcaagatcaaaagttattaattaaacatgttgataaatttttctcacagctcacaaatattgctgctattgaacaagaattaatgaaaaatttgtttgtattatcatcttcaaatgagtatacttatcaaagtttgatgaaaaaatcattacaagaaagatgtgaatcattccttcaaacaactaactttttagccaaagatgttgaaagtgatcgtgaagttgctgatgatatatacgaattgatgagacaaatatttgatccagctttcggtgcaactctaaaaattgtgtcatcgatatctaaaaataatatgatcttgacgccaggactcttatcattactgaataaatattttaagttattagcaccaaccgcacatgagtatttatatggtagtttctctaaacttgattcgaaaattaactcattatggattaaagaggtcgatcttcaaattcatgatatatttagcaatgagattcattgtatggtatccaatagtacaaaagcatacccagttttctttttcaagatacaaggaattattgattctttagatttggtgaatgtggccgaatttggttctgatgagaaaaactatggtaactattacatgatgtttggaaatttgaaagctgcattgaataaaggtgttgaaaatgcaaaattggaagttcccttgaatgaacatgaagttgataacgatgaaggtgatattaaaatctccattcaaaagcatcttacattatgggtaaattataagtggctacatgaagaagtcaaacatttgaaagaatatccaaaagatttgagcaaatcaatagatgatttgagagatcaagagctgaaattgtttggttcattttttgctaaacaataccatattggtaatattatgagattggttgatgatcttgaaaatttgatttctaatggtggtaacccttcaaactatgaaaactatgcagctgaaaacatcaaaactatgatgtctccatttaagggagatacctttaaacaagatattaccaatattgcaaatgatttaaatatgattttagctggtcgttgttataataaaaccgatccatccaaggaaaatgaatacacaactacaattggtaaacaaatcgaaaaagaagctttataacaattgtatgtatagtttatctcaactatacatttctacatttacaaaactttctgctattgttgaaaagcattacaccaactttgaagttcctgttgataagtatattattaatttcaactttaaaaaagcattacttatagtttttttatttatattatatatatatatatatatagacttaatctactattatctaaacaagcaatcgatttatgtaatgaatgcttgaaagacagttacatataccaaatatcggccaattgagattgcatgaaaattcaaaatttgagatttgacatgattctgaggtttcccttttcctgtatgtaatattgctttctaaatttgtagttaagccatatcatttatcaatctgcctggacaagaagtaaacgattattactatgaggatggttgtaaattttattgaatcttttggcattgatggttcaattcccgatgctgattattcattacttgggtagttgaagagtacttagcaaatgcacaggaaactttcaacaaccctgacaacataacgacgaagtttagaaaattctcttcatcaactgcatcagataaaccagttgagggtgaacttgatgatgagaaagatagtttggaacaaaagattgtaaatgctaatgacatagtagatatcgtgcatgcacatggtttcaaagttcatgaacatgtcgtacaaacaaaagatggttacttactatcctatacatagaatactctcaccatctggaagaatcccaaacaatgaaaaagtggatatatatgcatcacggtttattgactaacagtgaagttatttgtattgggggaaactaaagaaaaatgtttacctttcattttggttgaacaagggtacgatgtatggttgggaaacaacagaggaaataaatattcaagaaaacatcttatattatcatctaaagacgaaaaattctggaattactcattggatgaatttgctatgtttgatataccaaatacaatagattatgttcttaaagttacaaataaaaaatcattaagttacataggttttagtcaaggctctgcccaatgtttggctgcactttcattgaatcatgaactaaatcagaaaataaatgtatttattggcttatccccggcaatgattcctaagggcttaaataatccgatttgttcttttttgataagttcagcaccaaatttattatatagaatatttgggaaaagagctttattaccttctgtggttttctggcaaaagttaatgggaccgaatttatatcaaacggttgttgataaatcactagtgtttttattcaactggagttctggaaatattgaaacttcacaaaaaaagataggatacccacacatgttttcaccatcttcagttaaatctgttgctcattggtttcaaataattgataataaaagattccaaatgtttgatgaaggtggttcatcaggatccaatttggtatattttagtgggacttcaaaaaaaacaaacagagttgctcctttccccactcaaacaatatcaacttcatgtttattgatatactggaaaaagcgatatgttaattgatatcgacaaaacattggataatttgagttgtgaaattgaggtaataggaatagatggttatgaacatatggatacattgtgggcttccaacgtggaaaaaaaggtttttgaacctcttttgcgttatttgaagagcagttagtagttcatgatgttttaagatataaatcttcaactctagttttttcattgatgtcaagcttttgatttttatgttttccatatttgtattgtttgaattgtttgctattcgtatcattatttgcaaacttaaccttttttactttgaagccacgtgagttcttcttttctcttttcatctcttttttcttttgtttctgtaatactggagtattgagcatcttgaatacctcctcttcttgaaatatagcctcttgagtagaaagatatttcacgtagtgttcaagatagtggcttctctttttccatatctatttataattcaaatattaatgttagtattatcttcacaaaaaagaggtaaaaaaaaacacttacatttgaaactacttttgacttctgctcaaatgtcaaattaggcagcttatctctaattagatttttcgtaagaccccgaaatatcataaacatatttcttggctttcttttatatttttcaactcttggacgttttatttccttgaatttcttgttgttaaggccctctcccggtgtgactatatcaacgaactcaatagtttttaaaggtatataagtcgtttcttcggtttcttcagtttctttatcatcatgacgtacagcagcatctactgcatcatttacttcttctgggattctgaatgtgtacatgtgactaagcgtatagttggcaaacaggagttaataaaatagataaaaataaatcaactgagatggggatatttgcccttttttctggacctaatcatgtggtaacgctcaaattatctttcgcaagtacatattacatgcaattatatgaatcggagactcaatcgaaaaacaaattttctgactgtattatatcatcaattcctaaaaattatgaaacaggttcagacctgaaacaagttttaaagccaatttttttgcaccaaaaaaatatttaaagtctgattttatcgcttgttaggcccccctttgcagaacagtctttctttatttaacacaaaaacccgtttcactatatatttcactgaacactttaatataaaatggaggagcatacagggggaaccaacttagaaactacaatttttccattacttagtatttgtagtctaacaaacgagtacagaaaaaagacggacattagtaaagtcaaatgttcatttccaaagttatcactaatggaagagctgccaaaaagcttacatccccgaattcagagtttgctagatgtatgccaaaaaaattttgagaaagaagcaatggtactactgaagaataatttatcaaatacagatattgatgtactattttccaaatacaaagagtatgttttgaactacatcgtcttgaaaacagactacttaggcatttcaaacttccaaaactcaccagaatgcacttcttgggagaacacagatttgttatttgattctatcaatcaatcagacataggcaacttatcatacaacctctcagattttgaatttgataatcttaatatccacacacaagaaaacttaattgactcatccttgttacagtttgaaacttctacgatacccaaggcacccgaaccagaatacacagaatacacagaattttttcaggaaatcccatcagaatcaaacaaaaaagtaccccaaacaattgttttctccgcaaatcccaacgcatccgataacttttccacgagtaaaagaagactgctttccaaagaaaaccaaaaaatgttaaatgctttatttgatataaagcgtttcccaaactcaaatgaaagaaaactgatagctgagaagtgtaaaatgactcccagccaagtccgagtttggtttacgaataaaagagcaagatacaaaagaaaacactagtttgatcttgagttttatctttataacactttactatatataatatatccaattaaattccaaatcgattcagcaattaccatttattttactatcactactcacaagtcatagtaattctactttttaaataattttcttaaaagtaaacattttttttttcactacaaaaatacactagtatattagatataccacaaatcaatcaataatccgaaatcaatctattcttcatcactatcatcatctttataactaaactttcttatttctcctaatctctttctagctgaagataattcattttcaagttttaaaatttcaacttgttgttccatttcaacagttttattttcatgaattgaaagtttactataatcaatctcatctaattcattcttatttgtaattaattggttaacttgattaactaattgtttacaagcgagattaactttctttgatgcatcttctaatttatcttgagttttagacatgaattgagatttaactcttgcagccgatacaagttgagcagttgatgctgcaacttctcttgatgcaacaactaattcttcatttgaatgtttattttgtaaaacaccatcagcaattctaattaatgtatttgttgcatatgcaattgattttgctgcagatattaaaccttcagtccatttattatttttcttataaaatgatgttcttgaattcgatcctctaccattattaacaatttcttgttgcgattcaattgatgcttcaattaaatatttaatagctgaaataattgcagatgcagatgctaaaattgatttattaacttcaatatcaattgctgaaattgatggatcaaaaggttgattcaataatgaaattaaatgagttgcagcttgttcaataacttttgatgcatttgccatttctttatcaacaacatcacttaattcaccagtaattttatcaagattaattttagaacttggagttttcaatgattcgattaattgtaataatgtttgtaaaatttcttgtaaatcaatattaccattaattaccacatcagttttatcttcaatatttaaagataaaatatttttatgaaataatgattctaaataaacttcagacatttcagcaacatctcttgcagtatcaattaagtcatcttggaaatcatcagattttgttaatctagttaatcctttagtattaagtaaaatatcaccaatagatgtagtaaaattagtaatactatcaataactgttgcttcatcaccattaataccatcaactaagaaagaattaaaacttaatgcaaattctgttgataaaccagaagatttttcaataattgttgaaacatattcaggcgatgagtttaaattaccaccttgcattggagaatctaactcaaaaacggcatcttgaattctacttataccagattttaaaattgcatcaattaatctataaaatctatcagaatttgaattcatttgattttccttatttgcatgtttctccttttgctctttaactaaatctttgatagtttcatccattgtttgttgcatcatttcaatttccatatctttttcttctaataattcctgtaattcctttaatttttcatcacttggtgcattaagtgtaacattgtttaatttattttgtaattcttcaatttctttattatgttgtgtaaaaatagcacttaaattagcagattgagctctatctaatgtagctaatttttcttctaaactatccttttcaagttgtaaagtttgtaaatctgttttagtaccattttttaatctttctaattctaacttagctctatctctttctttaatcaaatctgctaattcaatatttttagctttcatatctctttctagtttttcacgtttatcaattgcttcttgagctgaagctgccttttgttcaatttttttggattttgctaatagattcaaatgttcagttcttaattgtgaatataattttgctaatgattcatatttagatttccaataatcaacttgttcttgtaaatagtttaattgttcttcctttgaagctaattgttgttgagcagtttgtgtagttgttgataattctgcttctaaagcttgaactttttgatcataactttgtaacatcaattgatcattatcatattgtccttttaaagttaaaatatctctctctaattcagcaactttaccttgagcatgtctttgagtttgttctaataataattgttgttgagccaattgttgagcttccatttgctttctttgttgctcttcccaatattgttgttgttgtaattgttgctgttgttgctgttgaagttccaattgacgctgttgttctaattgttgttgctctaattcaaactgatgttgttgttgattaaaagcatttgtaacagcacctgttggttgagaagtgattggtctcacagattgaggagtttcagttcttgaaggtgaaaaattagttgcagcagttttttgttctcttaatggaggtaaattaacatcatcaatattattatcattattatcattatcattgataattaaatttggagcatcgaaaggtaattttggaattgtaattaaagttgttaaatatttaatcattgaacattgagaataaaaatcatataatctaacatgttgatcattaaattgtgattttaaaggttctaaaacatcaatagaatctgacattttatacattgctctaagcattgaaattaagaatttgtaaataccataagattcagcaacaattggaactaaagcactaataattgcctctgaaggattatttctaattgcagaaaaaatatctttaccgaaagtatctaaagaatcttgtaatgataataaatcaataattgcatcataaccttcatttggatcagatacagtacttaatgaaacatattcctcatattcaaaagtaccattaaaacctctatgattatgatgaaatcttaatttttttaaaagataattaacatattcaggtattaaaacttgatatcttctatccattgtacgtaaagtatctaaatttgaaatccaattcatatttttaaaaccaccaactaaacaagaattatgaccttcttgtaaaactttatgaattaaaattaaggctttaaataattgaatatctgaatcttttaatggtaaaactttaagtgattcccaaaattcttttgaagatttatgatcccaagtgtaaagtatacaagctctaacatgtttcctctttgaagctgaatcatctgtattacaggctttcttaattgccgactgaatgtctgagacgtgtctactagatccaaacatagtgctatggtcaattggcaacagtaagttctaccttctacaacctaagtatcctatttaaatacattccaaacaaacaactaacaacaattctaccaccagagcctccttccccgtccgattgagcgccactaagctcggaaatttggaagtatccaatgaacccctcggaaatttcattcattttcattattttcacgatttcgtcattttcactgattttttttccatttttcaaaattttcacttttcacagagggaaggagagggtatactttggtattactatattattatgttattatgggataccaataggttgtatcttctttttctttcttctctcttttcttttcttcaaggttcaattaattaactgatactttatataccactcgattctattatatgagtaatatcgaaaacttaaaatcctttgatccttttgccgacactggtgatgatgaaactgaattaactaattatatccatattcgtattcaacaaagaaatggtagaaaaactttaacaactgttcaaggtttacctgatgaatatgatttaaagaaaattttaaaagttattaaaaaagattttgcctgtaatggtaatattgttaaagatgaagaattaggtgaagttattcaattacaaggtgatcaacgtttaaaagttatggaatttatggttgaagctttaggtgttaaaaagaaaaatattaaaatccatggtttctaagtattatatctatatctatgcctattatcttttggatgctacagtatgagatttcagaagttaccttcttttaaatgcttgtgtatgtatatgtgagtttaaatattgacatatagtacaattagtatttaaagtctttattttaacaccatcacattcttctttatatagtatattcttttagtaatgcatttctttaatttgttaattatataccactttgaaatcgtaattctaatttatcaatagtaagagattccttttcctttgcgtcattataagtttttttttcttttttttaaaactttcttacacaatttactaaagaaacatcattgaattggttacttcattcaccacttaatatgccttcggacttgaatcttaagaaatcttggaatcctaaacttatcaaaacagagaaaaagtttgggaaaaggaacgtgaaatactaaatgaatataaaaaatcacaacaacataatgcaaaattaaaggaaataagtgaaaaaaatgaattattatcactagctaaaagtctcaatgaaccaagtgaaaagaaagacgttaaaacaagttggatgtataattctccaaatattggaaatggaaaagatgaaggttttgatgaagatgttttattgggtaaacgtaaaattgataacttatcatcattaaataaaaataaggataaatcttcacgtatggataaaataataaaacatggccttgaaaagaagagtgaggaaccaataaaggatacagctattggtacaggaaccatagataagtatgcagaacttgaaaaaatgtcaaaatctgatccattgtacaaaatcaaattgaaagaactacaacgacaagaacaattagagaaacaaaagaaattgatgaagaacttaaagaaagatagaaaggaaagagatggtgattcacatgaaagaactacatcatcttatagatcaagagattcttcatatacaggatattctagacatagacaatcaactaatagatatgaaagtaaaaattcagaaagacatccatacagatctgaaggatacagaagttcaagagagtatgatccagagagaagatctcatagttacagagatagaagataattgttaattttatttacacatcaattattcaatttagtattttatgatacaaaagatagtgtcaccagttccaacatctaaatcacataaatattcatcatcaccaactagttttttccctttcttactataaaaactcaaatcatcaacagtaacgggattttgaatatgttttttgttatgatgataaacttcagaggttgtaaaccaattatgaactttacctttaatgaatttcaaatctgtaccatattcttcatgtgcatattcttcaggactgaattcaaaatgataaacaattggatatttgagtaaataatcacgtttatcagctttaattttctcatcatcagtttcttcatcaactttttctttacttaataaattgattgaaacataaacatgtgcacaatgaacaggaatttccttgaagacttcatcagctggattcttccataaattaagtgcaacaccaagatgcagtatagtttcataaatcgcaagtaatattcctaaataaatcaataaacaagtaataaatcttgaaggttttgatgcaattaaatgtgatgtgaattccgtctttgttaatggattcaaaatgtatttgtttgtaaatgcaataaacattattacaatatcatttttcattaatcctttgtaaacattgtctgcaatgttttgtatatcttccatctttactatataaactgtttgaacttattcttcaatgtaaacacatcaagttcaatgaagaacttttaaagtttcactgtgatgaaaaatgccaatattttttaacatgccataatggaaacttcgttgcgacaatttccactccatttctcttatatagggagtaatcggtgttaacaagtgagttacttatagagacatgtcttcatctgttaagacagccttatatgctgtaattatagcgttctcaagttcatatataacttacaaacttatatcgaaaaatgctgaatataagtcattgaaagatcaggctccgaaaaggaaagataatattgcagaattaattggaaacactccattagttaaaatacagtcattatcaaatgaaactggcagtgaaatctatgctaaactagaacttgcgaacccaggtggttctgctaaggatagggttgcattatctgttattagacattttgaagaaacgggtgaactcgtacctggtagaaatgatgttctcttcgaaggtacatctggttcaactggtatttcatttgcaatgctatgtaatgcattaggttacactgcacatatttgtttgcctgatgatacatctaatgaaaagttacaacttttagaaagttatggagctgagattgaaaaagttaaacctgcatcaattgttgatcctaatcaatatgttaatgctgcaaggaaaggtgcattagcattacaaaatgataaatcaacagaatctaatggtgtttttgcagatcaatttgaaaatgataataattggagaattcattatgcaactactggtcctgaaatttgggaacaaatgaatcacgatattgattatttcgttacaggttcaggtacgggtggtacaattgctggttgttcaagatatttaaaatccgtttctgataaaataaaagttttccttgcagatcctcaaggttcagggatgtttaacagagttaaatatggtgttatgtatgatcaagttgaaaaggaaggtacacgacgtagacatcaagttgatacacttattgaagggattggattgaatagagttactcataattttttccagggtgaacattgtattgatgattcgatacgagtgactgatgaggaagctttgaaaatggctagatatttaagtgctaatgatggtctgtttgttggttcaagtagtagtatcaatgccgttgctgctgttagaattgcacaaaatgcaaaacctggatctaaaattgtaatgattgcttgtgattcaggttctcgtcatttatcaaagttctggaaggaagctttgaaagttgacaagaatattcaactaaaagacattcttgaacaataaacacggtacctttaaatcatttctctattagtgtttaaattttatacagactatttatagatcatcgaaaaatccttgagtttgtgcaggttgtttcttttgctttttattagctctaactaaatctttccaatcaacttcaacgtcagaatcactatcgtcaacaccatctgcttctttctgtttttgaagttcagcttcaactgcgtctcttcttttagacatcttttcacgtctttctaacttattttctttggtatcaacttttttactccatgctgagttcttttccttaagttccttcttcagtaaagctttttgctttctttcctttcttcttttctcagtctttagctcctccaatctggctgcctcctttacttcatctttatatttataagtgtcaaagtcaatactatcatcaaaccatccatcagttggaaaatctttaatatatttattctctggcattttagggtatcttgtaagaccatgaagttttgctaatttcaaataatttaattctgctaatctaaaaatagaagaagcaacatgctttgagtaatatctagtataaccaacataacatctaactgcatgatcataacgtgctctatcttccagtaaccagcttctcatcttttcatcaaaattcttgacaagttcttcatttaatttaggagtttcctgtagtttaagatctatatttttaacatttaagaaatttatatattcctcttctctaccttcactaatcatcgttattgcactaccaattttattagcacgtcctgttctaccacatctatgtaagaaaacatcaggctctgtaggtggatctaattgaatgactaaatcaacatcaggaatatctatacctctagctgcaacatcagttgtaaataaaacagatttgaaaggtgattcctctgcaaatgtattcaaagttttcattctaggttttgcttctaacttcccatgcaatgagtaaatattaacagtttctgattctggtgtattagattttttaactaattccatgaaaaagttaaaaaaatgggtaacagcaaaattagttgggaaatatactataacttttttatatctaaacttaagtagtagttgatataatattttcaacttgagttctggatcaacaaccatatatgataagttcaagctttctggtgctgaatttgcagctaatgaagcagatttaactgtaattttaactggattggtcataccagctttaaagattttggaaccaacagctgaaatagtcgcagagaaaagaccggttcttctttgtgatggtaaatatcttacaatggattgtgtatcatttatgaaaccatcatctaatagtttatcagcttcatcaagaatcattatttcacatttattagttttaatagagttacttgaaaaaaagtctattattctaccgggtgtaccaattagaatttgtggtttagttttatgaaacaattctaaatcttctctaacattttgcatagaaccgactaataattgtgtgccgattctcttctcttcttccggttgtaattcaattactgagttgaaaactgtgttgatttgattagctaattctctagttggtgcaacaactaatgcgccaaattgacctttctttaactctgcttctttaagtagtttaataactttttctaaaacaggaatcacatacgctaatgttttacctgaaccagtaacggcttccaccacaacatccttatgttgagataataatggaattgttgatgcttgaactggtgtcattgaggtaaaacctaatgtaatcattgcatttttaacccatggttcaatttgatatgacagatcgtcccaagatacagacgctacttccttcttcattgttttagtcaatactcaaaaaggttttttatactattgaaaagaaaaaagtttcagaaaaaaatatttttaaaagtgttgatgaaaaattacctttttgggaaacagcattgtaaaaaatttgagattttaaattcttttgatgttcagctggtttatcaacaaaagtttctttctttattttaatactctctcttgaaataatatttttatgcttgtttacaagcgattaattaactttaaacctaggctaacatttgataaagttttgataagaaaaatgtccaataattttgaatgtatcgactattccaaatggtccaagaaggagcttttagctagaattcatgaattagaaggaacaaaaaatgatgataagagtatatcaaataataacagcataaataatacaattgaaataactctccctaaacgaaaaaagcaaaagacatttgatttcagtaaatacagcaaaagaaaaatagcattaagattttcttatttaggatggaactatcaaggtcttgcactacagggagaaccaactgaacttccaacagttgaagaaaagataatggaggcattatttaaagtaaaactcattggttcacttgaacaacaagattgcgaattcagcagatgtggaagaacggatagaggtgttagtgctatgaatcaagtgatttcacttgtggttagatccaacttaacagaggaagagttgaaagatccaaaaaatgatgaaaaagaagtagactacatcaaatcactcaatcaatctctatcaaatgatatcagaatgcatagtatctgtttaagaccaccaacaaattttgatgccagatttgattgtactttcagacattataagtatattttcaatggtgaaaatttaaacatcgaagctatgaacaaagctgcaagttttttccttggagaaaatgattttagaaacttctgtaaaattgatgcatctaaacaaataactaactttaaaagaactataacaatggcacaaattgatccaattgaaaatcaagataatcattttgtgtttaatttaaaaggtactgcatttttatggcatcaagtgagatgcatggttggtgttttattgacagttgctcaaaacttagaagatccaactatagttcaacaattattggacattgaaaagtatccgtcaagacctacatataaaatggctcacgatataccgttggtgttatatgattgtggatttgatccagagaagataaaatggacaactggaccaaagagaacatttgacacaaatgcatgtgttaatggattatggaatgattatcacataaagagtattatgcttgattttatgaaagattttaccattactccatttgaggatccaactaaaaagataaatgtcaatttaggtgatggtattggtcaaacagttaaagaatatgtaaagtacgaaaaaaggggccgactcgaaactgctgaagagataaatgctaaatggaaaggaaaaaagagtcagaaggtcaagaaatagtcatatcgaactggtactgtaactctatttattgcattgtatataatctcttgtaaataatataaatgaacaatttagaaaacccgttttaaagtaacatacttttttgtgttgtcgtgtcaactgcacaattttcttctccggttgccaatcaccaatggatcaattactctcaaaggctggaagtacgttagttacatttgctgtccgatctggagtgcaagtagcgtcaacatatgttataaaatcagtgtcaacattagtggaaaatgttcctgaacatcaaaaacgtagacttgaatcaaaacaaaatcaattgaaatacaaaatcgaaactgtaacgtgtacaattgatatgatttatctaatggcagcaaggggtaactccaatttagaaagtacattacaattatgtaactatttgaaggatgatatcaatgagttttcaagtgatatagatattattaattcaaaggcaaatgagaaaactttatatattgatactattagaattatagaaactaagatagatgggttggtgaagaagatagataatttaattccactcctaaatatggtattaatgacacattcaatgtcatcgggcagtcattttcaagattatgtttcacctggtagactacttaaagcaactactatggttattgaatccaatgaaaagttcatctctgtgaaagagaatcaatatattaaagttggaccggagttttctttgacattttatgatgtgttttacaatcactccagtgaactaaacaatggtaatccaattacatggagagagaaatatgcacgttgtaaatttcaaatttacaggaaaccagataaggaaatgacatactcgtatgacttgaagattatagaagattttaatgatgatagatatcatgatgatggggaggagaaaggtgaaaacacttttaatattcaactagtttcaaaattattctttagtgcatcaggtaaattgttaaaacttgaagatagagcaactcctgttcttgtattcaaaatgagaaaaaatttacagatgttggaaggtgaccaggctgttgatgacgatagtatgtatcattggattgcatttggtgattatgaagaaagtgtatcaagttcagattctgaggaggacgaaggagaagagaaggataatggagatagtagtgacgatgattcgtatgcagatgcgaaatctgctgatttgattgaaaagattgaagttaaagcaaaagaacctgctaaacataagccattgaaaccatcgccactttcattattggaatatctcattagactttgtacattgcaagctaatgatcaagtttcattacttgacagcactgatgagagattacgtctctatttatcagatgaaaattacagtaatagtgtgtcattgaagttgaaatcacttaccagcaagatggaggaaatgaagttgtaattttaattccttcaatattgagatgtttgacatgttgatttcagatgagtaacataatattggtctgaaaacatttatgttttcaactcttgatattattattaaccaattacaatggtttaatttcttgatgtcatgttatataagtgtatgtagttgttgatagtaaaataacgttagaaagaacaagagacattaagctaagtataatttttcagcatgcatgaaaatcgacatttcatgaagaattttttttattatcgaattccaattacctcttgttttttgttttacttatccttatacaataacacaacgtcaagatggttgatattgttggtaagatcaaagaaattcaagatgaaatggctagaacccaaaagaataaagccacagaataccatttgggtcttttgaagggtaaattagctaaatatagaagaatgcttcttgaacctgaaggaggagcaggagcaagtaagggacaaggatttgaagttcaaaaaagtggtgatgctcgtgtttgtcttattggttatccatctgttggtaaatcatcatttttatcaaaagttactaagacaaaatctgaagttgcaggttatgaatttacaacattaacatcagttcccggtgttcttgaatacgaaggtgcagagattcaaattgttgatttacctggtattatcagaggtgcaagtgagggtagaggtagaggtagacaagtcgtttcaactgctaaaactgctgatttaattttaattgttttagatgcaactaaatcacatcaacaacgtgaacatttagaacatgaactagaagcaattggtattcgtttaaataaggaaaagccaaatatgaatattaaaataaagaaaacaggtggtgtcaaattaaattgtctacaccaacaaaatatattgatgaaagaatggttagtaatattttaaaagattataaaatacataatgcagatgttatgattagagatgaaaatataacagttgatgatttaatcgatgttattaatgaacaacacatagtttatacaccagtgtctttatgtttataataaagttgatgcagtttcattagaggaagttgataaaattgcaagagaaccaaatactgttgttatgtcatgtgaattagatttaggtatacaagatgttgttgaagaaatatggtatagattagatttattaagactttacactaaaagaagaggaagtccgcctgatttcaaaggtccaatggttgttagacatgattcatcgatcgaagatgtctgtaactcaattcatagagattttaaagatcagtttaaatatgcattagtttggggttcatcatcaaagtttggtaatgcaccacaaaaatgtgggttgaaccataaagttcatgatcaggatgtggtttctattttcactaaatgatgtagtttaattccataatttttgtacaattttataaatttttatttggatgtacttttctctaaaagtaattggaaatttcgttcatctataataagatcagattcaagtttatttattttttcatcccatttatccaatgttgattcaatatttttgaattcttgatctaatccattcataaaagtgacggtattttgtgcatttctaattacatcttgtaatgaattaaaacgtaatgttaaattattcaataagttttcatactcaggtaattttttgactttatcatagagaaagtttcaacttttttatcatttaatggtacaatttcattgatattcttaattttcttggagttttgtataaataattcacaattttctattaagtttgttacttcttcatctatagtttttaaattcccaccgttgtctaataatatgttaactcgtttgtataggtcatcaattatagctttgaaagttgcgtgactcatcgggattttgataccctgtacgtgattctaattgacttattctgtgttccaagttagattgtaatatgtcgtcggagtgtgagatgtcagctttatcatgttcacgctcagtttcgtgttccttttcaacattattcaacattaacttcaccgagcttcttgtcccaataatcaatatatttattctgcaaattactactattaaagatatcaatctcattcatcaaagaatcaactttatctaataaaggtttctctagatcattttgatcatttttcaattccttcattaaggaacgtaattctttctcgagtaaagtgaatctcaaaactctatttttgtgaatggtatctttatcattggtttgaatatcaccacccaaccttaaatttccgtttaatagttcgagttttagttttgattcaaattcttcatttaattgtttcattttattaatatcgggttcttcaataattaattctgcattttcaaattcttcaattggttcttccctcagagctgtatttattacttctgttttggataattgatggaaatgattcgtatatttcctcatcatcacatggtaatatatcctccgaataatagtccgtcattttggcgtttgaaagaagaaggcatgtcaaatgtgaataagactagggcgtgtggtagattttttcagtgtctatattcgaatttacgattcatgattaattttttatgtttatgtttttttactaaatacatacaagaacttattttcaaattataatgttaaacgaataataatgatgaaaaagaaaggatagaagtgagtaatgatgattatgaatatgattatatagtaaagttaaatttataatgatgataaaattttgtgagtagtttcatcatcaattgcaccaattttgaataaataggtgattaaacttttaactaaaattattatatcatcagaacttaaattaacaataattgattgtaatacattaccgacattaacattatgagttgaaataaaagtttcataataaagatatgagaatgaacccattaaaaattgacaatccattctatcagttataccaccatgacctggaattgtatcaccaaaatccttaattttgaaagatcttttcaaacctgaggcaaagaatccaccaaatggagcaattaatgatgcaaacattgaaatgatcattgtatggaaataaattggtttcaattgtaaataatcagtatgtaaaatatcaactaagaaatttggtaatctataaatttgattaatgaaaactgaatttggatcacattcaacaattgaaaagaaattagtatatatattatcagatactggacaagtgaaataactgatattaccgaaaatgtaagtaaataaaattgatgataaagttgtacaaatccaagccccaacgaaaccttcaactgttttctttggagagattgagattaattgagttttaccgaatgtaataccacataaataagcaaaaatgtcattgataatgactaaaccagctgggacaacaaaccagaacataccatgtaaaatatttctaacaatacaatgaccttgtaaaataaccaataatagagtcatatgagttatacataattgagcaaattggaatctaagagaaccttttcttagagatgcaacaaatccaacaaatcccataacatagaaacaatatgagataaatttatgatgcattacgagtttaattgcaacaacacttgtataatcagataatacgaaattagtgaagacaatatttaattaaacttctaccatctaaataaaatatagttgttattaagaaccaccaattaagaggataagtataatgaagatcttctaatttagctcttaaagttgttatattaatacattctctgaaaactgttatttgaatgaataaaactgcaataatagtccagaattgaccagcagctaaagttgctaataaaccgaaagtcataattaaagtccaaatagttctaacaatgaaagtttgtttctttttctctctttcattgacaattacagattcactattgttttgaagttgttgaattagttactgattgaaacatctaaatcagaaacagttgaattgacgggttgtaaggatgattttgaaccagatctcaaggaagtattattaccttcatcatgaacatttgaagcggaggcagacattgggttactgaagcttaattgaccctgtgaataagataagatcaaaataaaagaaaacaatttaaatttgtaatttattaaattttactgggggccctgaagctaagaatttaatttttattttatttatatgaacagtctttttcacatgttaagtagaaattgtcggaattttcagtaggaatttttttatttcttcggaattttcggattttttatttttctttttttaattttttcaattttttatttttttaattttttatttttttccactggatctcagtcttcagacaggtgaacagaaggacatttcttttgggaacaggggctgaattatgagtactaatggtatatccaaaataccgcacagtaataaggataatggtacctcttcaaagttccagaatatggatcgagctagcctattggaaaaaattgatgaagatattcaagaattaaacttattgaagagtaaactgaaacaacttgaacaaaataagaaagaattacaggataatatagataatattgagaagaaagatgataactgatacagaaaaggataatgataatgataatgataaaaacacagaaactcaagaaaacacatcagtatctaagataactacatcaagtttcaacatctgcttcaccaatcgttgaagattggaaagataatacacaagcttcgaattttacgtgcatcaactcaaaggcaatatagacaatatgaacttgcatttgatagagttaaactgttttataaggaacaacacgaaaagcaaacagttgcatataattatcaagcaaggattaattttaaaactaaagttagagatcgtatgactgtttgggacgcattaattaaacttaataatttattagatgaatctgatcctgatacagaattatctcaaattgatcatgcattacaaacagctgaagcaataaggcacgacaataaaccaagatggtttcaattagttggattaattcatgatttaggtaaattattatatttttttgattctcaaggtcaatgggatgttgttggtgatactttcccagttggttgtagatattctaaaaaaattatctatcatgattattttaaaaaaaatccagattataaaaatcctttatattcaacaaaatatggtatttattcaccaaaatgtggtttggaaaatgttatgttaagttggggtcatgatgaatatatgtaccatcttgccaaggaacagacaactttaccacctgaaggtcttgcaatgattagatatcactcgttttatccttggcactcagagggtgcttataaatatttaatgagtgaaaaagatcatgaaatgttgaaatgtgttcaagctttcaatccttatgatttatattcaaaaactgatactaaatgtgatatcgaaactcttaaaccttattatttagagttaattgatgaattctttcctaataaaatagtggaattttaattcattttactaatattagtgtatattattaataatcctttactatataataaatgaaaaaatgctttttgaaattgatatatttttaaaattttactaaatgaaagttattaaaatatataaaatgaaattataaaatatacaaatataataatacgtgtgaaatgtaaatataattaatgaaattgaaaacgaaaatgaaaatgaaagttataattcattttcttttaatgtggaaggagcttcttataaagaaagttggtcttttataattgaaatctaaatgaatttgttattgatttttattgagcaggctgtgatgtttagaaaagatgttaatgttttaaattattattgacttattgaagtaattgaataataccaaagttttgttcaattccataaggaccaggatttttccataaatccttcaaaagctgataaaattgtaacatccacgccggcaacatctaaaattgattgcactgcaattctttgattatcaggacttggaatattattaccattttgaataccaccatttggataaccagtttctgtgacaacaatgtttttatcaccacaatattgtttaacaagttcaatttgacccttaacaaaaatacctgaagtttcagctgatgaataagtatcgaagtatgaatgtggattaataccaacaaaatcaatttgtgcttctgtacataattgtggattattttcaaatgtaacaggtggttcacttgttgtaattaatccattataacctgcagcttctaatttacctctaacttgagaaatttttgaaatcaaatcatcaactgaacaataatttgcgatgattgcttcattaccaacagtgaaatatgaaaaaatttcccaactgtaacttgctgcacctgatgtaatatatttgattaaatcatcaactgcagtatcaattgaattagcacctgcagatgagatccaaaaaccttgattgatcattaatcctaattttttagcaactggtaaaactgttgttaaataattacaatcattaccataaactcttagttctttaacaccctttgattggattaattgtaaatcagacaaaacagtggtataactcttacaagtaccatcattattgtatggagagtaaacaagggagtatggagtctttgttaagtatttagatgaatcaattgcagcagttgcagaagcagaagcagatgaaacagatgaagtgttttcaactgatgaatcatcacttaaaaggccatctggggttgatgtttgaacagcattaccttgagcagtagataatgaagatgaggttgtagaagtagatgatgaagtggttgatgatgagacaataattggagttgaaacagattgagtattagtaacagaaatggtagctggattgttaaaagtgactttaatgtttttatccattggtaaaccttcagttaaggtagctaacaacaatttgctatcagatgaaactaatgataattcagcagtagttgtttgtgcttctgcagtatttgccagagtagtagtggtaagagcaacaattggagcaacattttctggttcaaccaaaccttcaggtaagacagagtagaaaacttcaccatttgaccaagttgtaacaaaattatcttgtgttgtaaattttgaggatgaactagtagtcaataaagaagatgatgtagaagttgttggtggagttgtggaagtagttgatggagttgtagatgatgtagatgattctgttgatgatgatgttgatgattctgttgatgattctgttgtttcagttgaagatgttgttgattcaacagaagtattagcggttgtttcattggtggtttttgcagtagtggttgcggcagtatttgcagcagtatttgcagctggggtggtattttgaactaagtttggattagtagttgcaggagcaggtgctggagttggagtttgatattcaacagtgatagtgttaccattttgatcaaccttgacatgttcatttatagtgacaaaaacatgaacaacacctttgtcatcggtgtagattgaagtttttgtttcaggtgcttgtgattcagtttgttcttcttgagttgacgtagttggagcaggtgtagccgatgccgtcaaaggatcagtaactaaattagtattagttgtttgttgaggttgtgcttgaacattttcattaccaactaaattattgtacgtagtttgagcagtattaagagttgttaaagtagttgtgtaagtataatcattaccgatatgaacagcagcgactggaatgacagttgtgacaggagcttcagtaacagtgaccataactggttctgcatttggcattgccattggcattggaagtggagcagcatctgaagcttgcattatacttaaaagtgtgattaaagatttgaaattcattttttgaaatttgtttttaaaagattgtgtgtagttggattattgactatttgttaagtttaaaagagtgtataatagttggtatcaataatatatttaaagaaagtaagtagttggaatttctcaaagtaatgaatgaatgactgagttagatacttttagttggtgtttatttgttggttgaaaagttttgttttgtctaaaggaaacaagaaaaaaacaagaaaaaataagcaaaaaaaagcagagtttctttcgtacatttctttaaagttttggttttgtaaaaataccagaaaacatgtcctacttataaattcttttgaatagctcgacaatcgtcaaagtgggctttcactatgcgataattagagtaattgaagacacataatgttggctattgttcaagtgaaggctggttcctgcacaccttccgaattaggcaatcgcttaatttttttaaatttgtcgagcctcccatttttcatttattgttggtactctatctaggttagtttagacgaatgtatcgtttgaatatacccctggtgttagtgtaattagtgtcagtaacagtaaatctgtgtttagttaagtttattctactttgtgcttagctacttatgtacatttggtattagggaatggtagctcatggatagcaacctgatactcagagaggaaggctcgtcatcggcgaaatttgctggtttctcaatggggaaagtgtaaaaaaacccagccactactttttaacataatgttaaggatacatggggagaaattatcttttatggttgctgcaacctggttgattacatgctctcacaatgacgataatggagatgtattgcatatatagttatttattgtagaatagagatagtaggtatatagtgtagataaaagtttaatatttgcttctattgtgttaaagctgctatccaacagggcaacaattagaacaaagcagagcaaactaaagatactgcaaaaagttttttttatcgatgtttgctttgttttcctagggaaagccactattgcaacgtagtccccagtcattgctagtttaaatggaggaaatcaaacaagatgatgtgcctttagaaagttgcgtagttgaacagactaataaaagtaattttaatagtaataatgacattagtcatgatgatgatttaatatcattaactgatcatcaagaacatcagagtaatgatgctcaagatgtaattattactgaaaaggtaatagaagatgataggagtcagtagtattaatgcagaagcaataaattataatgtagtcaatgattgtagtaatggtggtatagttgaatatgataataatattaaagtaattgaatgcagtgatgaagacagtgttggatcatttgtaccacttgtttgttattcaatgttaatatcaatgggcggattcatatttggatatgatattggcaccattggtggattaggttgatttatcatcatttactggaatttatggtaattcaaatagttaatgatgtaaaatctttcaaacctgtaacaaagggtacaattgttagtatttcctgcttaggtggatttattagtggattgaattgtaaataaactattacctgtaatgggtatgagattcacaatatttgtttcaatggacaagttatgttattggtaattttattatactactttctgaaaattggaaagttattgttgtagcaagaattttcaatggtatagcaatcggaattacacaaattacatgtccgatgtttatcagtgagatcacacctattaagcaaagggggatattcacatgttttaatcaattatttactacatttggaattgttgttggatcaattacaatattattttcagcaacacagtattatccaagtgataatgcacaattccaatatccattatgtcagggtatagtattagcatcaattggcggaggattaatttggcttttacctgagagtcctaattggttagtaaaaaatgggtctccaattgataaagttaaagattcattaagaaagattcgtagtttaagtattgatgatgaaagattaaccaatttaacagttaaaacatttgatttaaatagagttgttgttaaaactaatgaaaaggatgattttaataatagtagatcaattctttatggtaaaccaagatatttcattagaacacttattggagtatgtttgttaggattccaacaatttacaggtattaattttttcttttattatggattaattatatttgaaaatgttgaattgaacacaccatatttagtaccggttatatttggaattgttaatttaatattttcaggattatcaatatttattatatcaattttccaaagaagagtattattaattagtggatcaacattattaacaattttaatgatattatttacaatatgtggtacaattttaggtaatagtttacaagtaacagtttcattaataattatatcatgtctatttatatcagttttcagtttaacatggggaccgattgcatcagttataataagtgaacttttcccaacaaacattaaagttaaagcaatgtcaatttgtggttcaagcgcatggattttcaattttacaatttcacttataataccaattttagcatcaacaattggattagcattaggtagtttatttgcaattattacaatgtctggagcaatatttgtttattatttaataccagagacaaaacatgttacaacaaatacattagatgaaaaatacagaaagagtatatttgtaaattagatttttttttgtaagataagagttatagtatattatttaaaaatttctttttatagatatagatttagataataaaatacatatcaaagacatgaattaattaaagataacttaacgggaagttgcatgaactttttggaaagcaccctttgattgttgctttgagattttagcaccagaagcaacttgttttgccttttcagcttttctcttttctttatcagccttcttcttttcctttgcagcagctaaagtttgagatctatcagcttttctttgttcaggttttaaagatcttctttgtttaattaaatctaatgaagcaccgacaattgctctttgatgtttaacagcttttcttgatctcttctttgcaacttcttcagtaatacctttcttgtgatgtcttctgaaaagaacagtccaagcaattcttcttggattctttctttgatggaataaagaagcagattttgaattttggaatctgaaaattttagaatcacctctaacgaaaagggtacctctacctggataaatttttgaaccagagaatgaatcaacttcgaccttcattttgtgattacggagatgtttgataaaagaagatagtaattaaaatatactgaaaaattaaataaaatttcaagaaaataattcagtataatagtatcaaaataacactaatactaagtaatatgaaattcaataaaaaaattcaatagtattggaaaaattgacaatatggtaatactccctccccagtgagaacttagggattatccccccgttaactgagggggcgagaattttgtttaattttcctcattttttgagaaagacgacttcctaattgggtaatgtgtgaaaaggttggtggtgcgcggggtgacgcacagaaatgggtgattttttcttttttgtgtgtggtttcagggtgattactcttttaggaaggagcgaatgggaaaaaaaattatattcagagagttttacatagtagtggaaaaaaaaatatttttcagtttttcaaccttcttataccttttacattacttcttagaagacaatcccagaccggagtgaataaccgaacaaatacacagagatggtcagtatatcttttacttaataacactattctataatgaataatcatactaacacataaactaaaaatgcatttatttgcataaatagtacaaaattgttttaatttaggcaccaaaaactaagaagaattccgaccttatgaacgctaaattagcgttaaccattaaatctggtaaatatactttaggttacaaatcaaccattaagtctatcagacaaggtaaggcaaagatgattattattgctgcaaatactccagttttaagaaaatctgaattagaatattacgctatgttatctaaaactcctgtttactatttccaaggtggtaacaatgaattaggtaccgcatgtggtaaattattcagagttggtgtcttatccattttagatgctggtgattctgatattttatcaattgcttaagttaattgttaattgtttaatattatatagtcattacgtaataaacaacattaatttaaaaatataaaaacttacgtaattaaactattgtattatcattaaattcccccacacgcatgcatgtcattaacatgccagttttctgttctgattctgattctgattctgattgttctccagaattttgtttaaaaggaacagtgtatcttttattcttttccttttctactcttctttatttctctctctttatcacaatgactgttgataacccttctacatatcctactcctccaaactctaactcaattgatgaaaatgtagttgttgaggaaactaataatgatgttttatctttagatgaaaatacttttgatatctatattcgtatgaagaaatcatttgaaaatgatttttgtttccaagttaataatgatacaacttttaaagatttattgaaaatatttgaaaaagttccaattatattctccccttcaattttttatgataaagtaccaatcagttttaaaatttctcattttcctggtatacttactagaactggtacaattttatttgaaactaaggctgataatgagaaatatttaaaatcaattaacaacctcaatgacaaagtttcagattatgtattaccaggtcaattgattattccggtatttaatgaacgttctttcctgcattattctgttatatcatttatttttgtttggttatacactgatttacctgatttcatctctccaactccaggtatttgtcttactaattatgcaactgatttaattgtttatttattaagagaagttttagagagacctgcacaagctgattccttttatagtgatattcatgcacctgttggaattttcggtcaatgtatttattttgcattccatattttcaaagttagtttattctatttcatcctctgggcaggattatttaatccttattcatggagaaaaccaaggttagcattaagtagagaagatttaattgaacttggttggactggtgttaaaaaggcttcaaaacaacaatatcaagatgattatagaaaaaatgcaattgctgaatatggtagtattatgaatttatacaaggcaggtaaattaagttatattaaacattgttttattgatttacaaaaaggtgaaggttatgatcaattaaataaaattgataaagaaattataccatttaaattaaataaacaattattattaaaggaacgtgaattattaaatgaaaaattaattaaattaccttatattgaagcttataattatttaaaaaattataggaaatcaggttcaatgactccatcaccaatctttaaatcaattattgatttaaaatttgctccaatggatgaagaaattcttgaaatgaaagaaaaattaatccaataactacaggtttgaatgaatcaagttcatcatcagttaaaactcttaatactgatacaacaactgaatcaaatgaaaaatagtaatcatcttttcaattaaaactcatttctttttttctatttccaaaaatcactatcgtcttgcaaagtttacttttctatataatatataaaacttaattttatattatatcattttcattttataattttttttataaatattaatctagctacggggtattattctcatcattagtaacatcactatcatcatcatcatcatcatcatcgttggcatatccttcctcatcctcttcttccacttcagttctaaattctttgaaaaattcatgctttaacaaattttctgcattttctctcttatttgaatataattccattgatttttctaataaatcaattgcattattatattcattacctaatttattatcaattattctaccccttttatcaattacacttaaaatttcccatgcaggtgaatcttctgcaaatgtatcaccctctctacaatccattaatatagaatttgcaattattgcagaaaaggaaattttattcttcatttttggtatattacaatctaaatttaatccatgtaaatttgcacattccttcatttcaattgtaccataaatattaattaattccattattgcttcaatatcatcagttgaattgaaaaaatgggaatcttcttgataataatgttaataacattacacctgctgaccaaatatcaattaatggagtttgacaagttacatttaaataaaacttcaggtgctctaaaacctcttgtacctgctctattggctcttctaccaggtctttgatcatctttaagataaccatttttgggataaactgataacttttcaaattttgaaatttcttcactattaaaacctccatttatacatggacatgcattatttataactggttcatatttttcagctaatccaaaatcaactaaaactcccttacctgtgaatggattgtaaaggaaattagttggtttgatatctctatgaattacatcatgtttatgaataaattcaattgcttgaaataagtcaaacatataattttttataccaattaatggtaaatctctataaaaatctctaaaatctgaatgtttataatatggtaaaactgcaataacttgatcttcatatctcaaaacatctaataatggtgcaacattttcattacctcttaaaatataaagtaaatttaattcattgaaaattctttgtggtgatgatgtaacataaattttctttaatgcaactaatgatgatattttattccttttattatcatgattattattaaatcgactaactttcctctctttacctaaataaacacttgaaaatgtaccttcaccaatcttactataaatttcataaattttatttaaatttggaaatgattcaaataattcaataatttcttcctttatactatttggtattgtataatttacacctaaaattgattgtacttcattatatgttatatcctctgcatcagctgtactaactcttgaatcagtatttataatttcaattgattcattatcatcagtattattatcattattattgttttcataagttgttaattcgtttaattcagttaattttttccttttattttcattttgtacttgttccagtattgattcattattatctgatctttgtcttttctgtaatgcaacatacttacgtcttttaatgagatccttcttagatctaagccgactttcatccattaacaaagtaccatccatcgttacctggtactatcaaaatcaataaaaggaaaaatggaaattggaaggaaatcggaaagggaaaatatttaaattcatgtttatacttacgcgtattattaagttagatttttatactatttctatagaagattacacaactgatcgagatggagtttcatctgttattggtggaggtgaaattgaagtagatggtttagatgtagttgatggtggctttaaagtacaaagtaatagagtatcacgtgcagtgtctaatgctttacttaatttttcagcattttcttcattccataaattctcttcaatatgaatattttcatcattttcacctttctcaactttatattgaaatgttttacttaattcctgtaatctaaacatttctcttgtatccccattctctgaacagactactaaaattgaattaggtgttaaattttcataaattttcattattctttcattaacttttgataacatttcttccttagttttaggtaattgtaaattttcaacaacattatttggtgaatattctttaaaccattctaattctcttaattttagtataattaagtcattctctaattgattttcaataaatttatcaataatttcatcatcattaaaacattgaatttgcttttcatgatgaccaaaatttttaacatttgaataaccaattacaactgattttttcggaattttttcaccatttgaatctttaattaatttataattttgttgaattcttttaaataatgattccatattataagatttaccataaagataacctttagaaatttttaatttaactaattccatacaactaatacaatcttcaactgaatcatgacctgaaattttcttttgaatatctttttcaaaatgttgattcattaacattttcaatgaagcttttgaaggtggacctcttggatgatcaaaacaaatcgatgtatcaattatattaggatgttttaatttaagtatatttaaatcactttcctaatgaatgtccaattaatatatcatttgatgaaacaattgataaaatttcattttgaatatcatttaaagttgtttcaattccaatcaattgttcctctgttatacctgaatattgtgtaacataatcaacaattggttcagatggtttaataagtttatcaataattatattattatcagaatcagttaatgaaactcttgctaaaactctactatcaattgatctacacatttcacaatcaagtgcatataatttttgatcattatgtaaaagagatgtacttttaaaatctgaagttaaattaattaattcagttgttgcatttggtgtatctttatgaattggataattattgaagattaaatcatcaattgataaacataaatctacatatgaaattttcctattttgattttccttttgaattgcagctttctgttttgaagataatgaatatgatataagtgaagaataagttgaaaaaatacattttttagaacctggtgcaatcattggaattacttcattgaaaattttattaaaatttgataaattatcatcgatggggtaattattaattaattttggatcaatttcatcctttaaaattggcataccaaattcatcatttgttaaaccacgtaaaaaaacaataacaaatttatcaactgatcttctattgattaaactacaccagtttggttttagattcatatcagttaatgaatataagagtaaatcacgtattgaagaaactgaaacttttttagttctatcatttaagattgataatttgggtatttcagctaaaaatttcttttttcttacaattactggtgcaactgatgatcttcttctcttttgacgtggtggaggtggaatgaaatttgtatcattacctgtctctgattcttcatcaattgcagattcattgtttttcttatttaaatttgctaattttttgttttgtttatgtaatttacgtttttcctttttattcaatgcttttttcgtattattagtcttattaggtagttcaattaatgtattttccttattaacatcatcattatcattatcattattattattactattattattattattatcatccttactcccatccttcccattgatatttaataagaatttttccctttcaatattatcatcaacggttatactcagacgagcaacacgatgatgcattccatgtgaatcttccatttccaaactgtccatgcgatgatttcaagcaaagttatccccctattaaagaagaacatgcatgtacagtcttcaaagactttatggggcaataaagtgttacttttaagagtaagcttacctaacaagacgcgtctatgtctattatgtctattatgctatatacactacttacttacttacttacttactattatcattgaaatcaactgtaattctagctcttggaccagcagtatgacgtttaacacgtgaatacattgaaacatcatgattaattatgaaatcaacaattatccaacaccaacttttatgttgaggtaaattattgtaaaattctggagcttccttggttaataaaggtaattttgaccatgcaatgtaggggaaatcatgatgttcagtatgataaccaacattccaagtgaaaaaattaagtggaccataatatgaataagtttcagttggaggtggagatttaaaagatttataatctgatggtggattgaaaatataatgttctgcaacgaaatgacctgcagttggatgtaatgaacctgcaaagaatgaagatataaggaaataaaataatgaataccaaccccaattattaacaattaaataatcaacgaaaaattgtactaaaacatttaataaatgaattgaagtaaaatctattgaagttacaaacattggacgtagagcgtagaagaagatttggaaagttgcaaagaaagctttacctaaaacacttgataatatgaaagcttcaaatggagttggtaaatctgtatcataaatttcatcacctaagaatttatgatgtaattgatgataaggttggaaagatgcagaatatgggataccaattggtaaatttgaaattattgagaataatctattatgtaaaggttttttaaaacctaaattatgacttaattcatgaatacataggaaacaattttgacttgcaaatcctccaatacaataagctaataataagaatttccaatttaatggatgagtatcttttaaataataagctattgaaaattgtaaaatgacaactcctagtgaaatccatttagttaaaggttcatgaccagttaattttgaaacatttggatgtgctttaagtattgctttacgtcttaaagaatgagcatctttttcatcagtccagaagaaatcttttggtggtgtcattattgaaaaaggggaggaggatatgatgaaggaaagaatatgtttgtttgactgaacagcaaataaataaagaagtagtgaaaatggtgaaaagtggtgatattttagtagtgataaaattattagataataaaatattaataacgtgttttgatctaggctgtatagttatatgctatacgatgtaaggaattacgtaagtttaggagtgatactgcccatgtgtgtaatgtaaagaagaagaacattgaatacatgagatagaatatcatcaagagataagtatatattcaatataacatactaactactaactactatccttcttactttactttactttaaggatggttatttatacttatagtgtatttgaaggctcatttatattttactttcttttcttcttttacttcttttctttaccttcttttcttttattcttttattctacaattgctattatatccacatagtatggttagtaatggtaatagtatctgtagtaaccaatgatttagtatactatactaacttatagagaggtaatatcccctctaccgactaccgacgagacgttccccctcctaatatttaatattaataaaatacagtgagaaaaactgaaatttctcagtgagtggaaaatatttgaaatttattagcattatggaatctttggcatgcttagttaactgttatttcaagtggagaatattgaatcattttattttatttattgattatataaacagggcatattatcccatctcatccacaatgctatctgtaaataaatttaaatttgttcgtcaaatgtcttcatttgtatctgaaaatagtgttaaattctctgttaatggtaatgctagaattatttcacttaatcgtccacaaaaattaaatgctttatcaaatgaaatgtgtaattcaattataccaagattagtagaattctcaaattcaaattctgctaaattaattataattgattcaactaatgaaaaatctttttgttcaggtggtgatatagttaattgtgttaaagataatttatctggtaattcaaataattcaattgattttttccaaaatgaatataatttaaattatttattatcaacttatggtaaaccaattgtttcaattgctaatggtattgtaatgggtggtggtgttggtttatctgttcataattcatttagagttataactgattcaactagatttgcaatgcctgaaacttcaatcggatttttcaatgatgttggtacatcattttggttaccaaaattagattttaatttaggttactatttatctttaacaggtgatgaattaattggtattgataatttattattaggttatggtactcattatgttccttcatcaaaattaaatgatttaaaattaagattatctgaaattgattatcctgaactttatcaagatagaagaaataattcaacaatttttaataaaaattcaacagatcaattatttgcattggttaattcaattattgaagaatttacaattgaaattccaaaaaatcataaatttaaatttaataataatgaattaaatacaattgaaaaatgttttaatccaaatactcaaaaatctgttaatgatataattaaatcattagaaaaagatggttctgaatttgcaattaaaacaattaataaattaaatgaaaaatctccattatcattaaatttaaattggaatttattattaaaaaataaaaatgtttcaattaaaaatgcattacaaagggaattaaaattagctggtaaattaatgagtaattatgaaaaaaatgattttaatgattttataaatgaaaaattaattttaaagaataaggaaaaattaattagtaaaaattataaatcaattgatagtgtaccatcatcaattgttgaaaatttaatttcattagatgttttcaataaaagtaatagtgaaaatgatcaaagtatagaagattcaaaatcaattgcaattcaaatggaaaaattaaattctttaagaatttcaagtccaaaaaatttgaaaaattcaattggtgattttacaaattatccacatcatatgggattaccaacagaaattgaaattaaaaattttataactggtggtaatgataaatctgttgaacctgtaacttataatgatgttattaaatattttaaattaaaatatgataataaagcaggtattgatgcaaagattaaattagttcttaatagaaaagattatggtttagctaaattataagttcatcatccacaccctcatcaaaacatgtaaatattatattttttatactcttccttttataaataatttaaactaataactaacttatccttttattaatgaagagacaaaaaatttcttatggtgaaccattatataaactaccattatctaatgattggcaattaattataactaatcatgcaaataaattttataataatattaaaactaataaatcattttggcaactacccaataatgaaggtgatatcaatgatgcaaaaggatacattaatgaaacatagagatgttatagtttgtttattagctatgattagaggtgtaaggaataagtcatgatatagaaattgaaattatgaatgttttcaaactagaacctattgaatcaaaaaaggaaattaaagaagtagttattgaaggaacaagaacaagaggaagtaaatgtatctgatgataatgatgatgataattattctgatttaggtcttaattcatcagatttagaagatttagaaaatgatattgaaactgatgacatacctacaattgaacaatcagaaatttgtaaaaactttattaaattattacaaaatcaacaaattaatatctattcatcatatgatttagaaattactcaattatgtaaattacctgaatatatcacaaatcaatgtaatacattaacagatgaaacacgacgaatacttttcgatgaatattgtcgtacaaatgttgataatacgattataatttcacctattatttcatttattaattttttgaaaaaatttgatggtaaattacctagtttctatacagattttaataggaaaatgagaaaggatgaggtttatgttggaataattgcagatatatcacttaatgctagacaaaatttatataaaaaatacattgagtttatgaaattgaaggaggatgaaagaataaatattgttaagaaattaccatttgatgtaactacgagtgatgaattaattaaatggagtttgaataaagtagatcaatatccacaaccattatttttaactgatgatcaattatcttcaatattttgaaaaaaaaatgttggtatctttaagtatataactatttatataactatttaattatctttacatcctactaatgtattacctggttttgaataacctgtcatattccataatgtattattccaattttgataagctaatggatgatcgtttatataatcataagttggataatcctcagggtcacaagttgtactaattgcatcgcttggttgataaattctaattgaatcaatttcaaatgtaacagggaatggaattgatgggaaatcaatataagcccaatttttagaaatacccatattaacaaccattgacattggttctttagaaatttgtctccaaccaatattaccattaggtgctaatgcatttgcataaactgttaatgttggatcattaccaacaaaccaacgtacataaccatcattatcatcatttaaatattcaaaagcatatttttggaaataacgttcaccttcacctctattataccaatcagtatttaatgttgtaattgctgaaactgcttgttgaaatggtccacctgcataagtattcattgttgtaactgaactattatgaacttcaacccaattataatcaggcatataccaaatatccattggagcgatttgcattgattgtgatgcaacaccaactctaatatttgtatcaacttcaccttcaataatatcaatttcaggtgcacctctaccaacaccaggatttggatggtcatcatttggacatgtacatttatttaatctttgacctggtaaataatttataccatcaggtgaagattgatttggtgttatacctgcatcacattcattataagcataaggccaaacaccatcagttgttgccatataacctggtctacctaaattacccattgaccataaacctggccataaacctgtaatattaccataatttggtaatctagctgaaacttccataataccttgagtaaaacacattctattccatgaatgtaacatacctgatctataaaataaatcatgatttttaaatgcatccattcttaaatttaatgtaccattagcagttgtaacagcatctggatcataccattctaaatcttttgttgcatcataatggaaatttggtgcataccaaaactgatcatcaccttcataaaaagttctaccttcagcagcaaattcatctagagaaaactaattgccaatctgaaccatcttttgcctttcttgtataataagttgatggagtatcgggatcaataagagaagttctaattgcacttaattgaggataaatataatcagttaaaattaatgtaccatcatcaatatattcagcatttgaaccagcaataccaacattctttattttaccattgaatctaatctatgatgatgattggcagcattagtataagtaagagcaggtaaaataacaaaaacacctataccacccaaaaggaaaaataataaaccaactaaagtccaacttgattttttatccattgattttaaatcattccaaactctatgtttttcatattttgcttcttcaattggatcaggattatgtaaataatcatcatcttccttttcatctattaaaagtggaaaacttgaagttggataaccaccaaatggagaaaaatctgtatcaaccataaaaggatttgaagaactatcactatttgaaaaagtatttgaattagcatttgaatttaaatcatctaaatcagttgtattattattattaaaggaattcattgaattaattcttgaatttgataaatttttaggatatctattatattcagcagtttgatttaaattattaagagagcttaatctatttgaagatgagaaaggatttaaaagtgatgaagaagttgaagagtctctaaatgaagaagatttataatttattgaatgttgttttatttcaggtgaatttgaagatgtggatgtgttacctatgttattattatttttaaattaatattattagtagaatttaataaattagcagcagatgaatcagttgaatcatcataactattatttccataaggtagatgaacaggatttgatatgttattactactatcattattatcatctatatcattaaaaggattatctaaattatctaaatcaagatctaaatcatcacttgaagcagaattagtatttgaggaagatgaattccctctattacctatatgaggagctctagaagtcaaagttcttggaggcatttcaaacgagtgtagtgtgatgagggtgatagagagatacagatacaactacagttcaaaataaaaccaaacaaaacaaaataaaataaaagaaaaactttaatataataaaccaaacagtaatattaaacgccccccccccctctataataataaccaggtccttagtataataataaaataaaataaatacacgctttttctttttctttttctttttatatagaagtattaatatagtattattattattacagtctcatcgactggtagtattggttattactgttaaagtgttatatacaggtaagtagcagtagtagtaagttactatttacttactatctttctcaatttgttccttcttttcaatatcaattgcataattaagcattgaaaatcctaaaactgaaaataataacatactagtcattaatttaaatgcaaattctgctcctgacattatactactatctcttggaccccaattaccatatgcaataaaataaattgcctttttctcctctttatttaaataattccatccaaattcttgtttaacattaagataactaattatatcttgttgtgattcatatgttaatgaattccatcttgtctctaaattacttacatcaacataatattcatctccttcttcattatcattatcattatctaatgtttcattttcttccacctgtattttacctttgttttcactttcacttttaatactgtattgtctttgtaatgttaataataatttattaacattactattatcattattattatgggtaaatactatattcttcttaacttgactaatacttctaatctgtacactattcaacctcacactacctctcaatacattcttcaatactccacgtgtaatcataatgtctatctctatactctaataaagaacctactgtacaattaacccatatatcttccaattcttccccataataaataaaatttccaatttcctcgcttaaccttcccaattaggcaattcactccttctttaacacttcatattcacttctataaccactgccataataaatcttacttgcaaatgaataaataatagctccaattataacaaatataattccaatatatccaattgaactaacattagttccaaaaacataaatactcaaaaataatgataaaaatcttctaattaacagtataattgcaagtgataatgcacttatcttgaaaactaacatattaactccaataatacaaattaattgtgtaatccaattggtaattaataatcttctaagtccaattcttttaattttttgtacaatgtaaatctctcggtataattgtccaatcattggtaaataaaatattacaccaaataaataattataatataaaatttcttgccattcaaatgtttgtttgtttttgtttctcttatttcctttcttattttgtaaataaatatcttccttaaataatgatgtaagactatttattatcgtacttgtcaataataacaaaattcccataaaataatttgtatcattatcaaactcattctcattatcaatattattatcaataacctcattttgactaacagcaattgtaaatataactgtaccaattgcaattattaatgatccataaactttatcccatgtatatcttttcttccaaatcaaccatcctaataataatgtcattgcagtacttgatgatcggaaaataatatgaactggcattggtaaattatattggaaaacataattactcatattagatgttaagctttgtgataataatggtattaaaaattctaaattaataaaatcattaaacttcttttctttaccttgtttctttaaattttcccaatatttattatgatcaagataaattgcaatacttaaaaaaatgaataatgtttgtgaaaatgtaattaatgtagttatttgtgaattaatattaataattttttcaaatatataaacatttgtacaacatcctgtaatcgatataccaatatatgttccaattctattccttaatgttaataacattgtctaaaaaaaagcaatgattgtaatagaatcggaaatttgatatcaccttaataaaatttaatgtgtgcatactttctgacaccccctcggagtacaagttcttcgagttgatcttgattctttcttatctagacaacacaataatatacacattaaagttgctagaatatcctaatatatatttcattaatgactacaaatacaaacaataagggtaaattaccacctcaaaggaaatttaaattatcttatatactttcacattcaacaaatgcaaataatcatttaaagcaacttaatgataatataattaatacagttaatttatataatgatgatattaatgaacaattgaattcagttattaaatttgaagatgaattaattggaaaattagagaatgttgaaaaaatttatgatattgtacatgatattagagtaaatgatataaatgataatcaaataatcaaagatgatggtaagaataatgataatgaatctgatggtaagaaagttaaaaaaggattggcatttggttcaatgtttaaaattggtaataataatggtagtaaacctattaataaatttcaacaatatgaacaaattaataatgaaattgaacaaattgttgataatacgatgaagaataagaaaaaattagattgtcttataaatagattgaaaaaattagaaattaaattaactaaacgtgaaagattatttgatattaatagtgtaaataaatatcattatcaaaaattatttaattatggtatgaaggatgaaattgctaaacaagatgaaaaaatggaagaaattgaaaaatatgttatagaaaatacttcaaggattgaaggtaataataataataataataataataataatcatgataatgatgtattatctaactcttcacataaatctaaaatttcaccaattaaattacagcaatatttagatattgagaatgaaattgaacaaatgcaaaaattaaaacaagaaaatgatagtaaaaacacaaacacaaagccaattctaacattatcatcaaataaatttggacctggattgaagtttcaatcgaataaaaaagttaataattcatcttttatcaattatgaaccaataactgtaattgctaatgttgataaaattgttgatgatattcatgttgaaaatgataatgttagtccattaattgatgaattaaagaaaatgtataaataaatgtaaaattaaaatgtaaataactcttttctaaataaaatacacaccctttttttttaatatacttataaaatctgttccacaacagattcgaaaattggatacatattagaactactgtataattctgataatgttttaccatgttctaattttaattttgattgattttcaattatatcaacaaatgatggatcaattggtacagcacctaaaaattttaaatttaattcatttgctaaattttcaccaccacctttactgaaaatatttgtacattcagcacaatatggacaaacaaaacctgacatattttccacaatacctaaaactttaaaagctgccttttcacaataattaatttctttacgaacatcatcaactgaaactaattgaggagttgttacaattactgcaccataaattttttcaggtactttatttaattcctctgcaattgcaatatgttcatcagaagtacctggaggagtatcaataattaaataatctaattccccccattgaacctctttgaaaaattgtctaatcataccagtttttttaggacctctccaaacaactgaatcacctctattattaagcaaaaatcctaatgacattactttaatattattaattgatttggaaggtatattaacaggtaaccaaccattatttgattgcattattttactattttccatatcaaacattctaggtaatgaaggaccagttaaatcaatatctaatacaccaattttataaccttttaatgataaagttaaagctaattgagttgttacagatgatttacctacacctcctttacctgataaaactaatataacatttttaacattaattaaagccttgggtatttcagtatctgacatttgtttccgtatatattgttccacaaatgaatatttaatcaaccttaatcttaaccttattcttatcaacattgattaatcatcattgaaatattcatgtaagcagcaaaatgaaaaaatctaaaaaaaagcttacgtaatgcacgcacgtgacattgcgcacaaatgccaaaaacgcgccatggcacgtgacatgcaataagctgagcctcatattcaagtttaaaattttttatggtgtgataataacctaatggagtaatttcacttgatttgatatcttaaacatgggacgacaagtttgggaaataacttcatttctttccactgatctccctattatcttattaatcaatgggaatgtcaactggatgaggagtttgcattatcatcgtatttatagctttatttcctttataaattttatcccatgcctttgattctagtttagatgaaatttttcagtatttttcagttatttcagttagtatttgatttattttttaatccttttttaactttatttttaattctattttttaataacgtaaccttttcatataactgcatatagataaaaatgacaactcctaaaattgcaattattggtgcaggtcctttaggtttaggatttgctaaagcaattgcagctgaaccaaatgcacaaaaaattttcaaagctattgatgtctatgagagacgtcctcaagctggtggattatggaatcatactggtgataaatcaaatgtttcatttgaattaactgaatcaaaaaataataaaaatgctttaaaggtaattgataatgatcctcatttatccccaatgtataaacatactgaaactaatattattaaacaaatgatgagatataaagattatccattacctgaaaattcaaatactttcccaattagaactgaagttttaaattatttattagattatcaaaaggaaattccaaattttgttaattttaaatttaatacaaaagtttcatctttattgaaaaataatgataataataaatgggaattaacaactaatcaaaatactgaaccaaatttatatgataaagttattttagctcacggtcattttgatactccatttgtaccaaaggctaaaggtttacttaattggtttaaaaatgatccaacttcagtttctcatgctaaatattataatgattgttcaaaatataaagatcaaaaagtacttattgttggtaattcagcttcaggtattgatatttctactcaattaattaccgtttcaaagcaaattgttatgtcatgtgttggtaaaccaatgtttgaaggtgtcattgaaaatcaaactgaacaaattgatggtattgcaaaatatgattttgaaaataatagatcagttattacaaattctggtaaagttatttcaaatattgataaaattttattttgtacaggttacctttatgaaattccatttttaaaatcgtatacaactggtgcaaatccaataataactgatggttcaaatatacatgatttatataaacaattattttatatacctgatacttcattaattttagcaggtttaccaaaatcaattataccattcccatttgctgaagctcaaggtcaatatgttgctagaattttatctggtagattatcattaccttcaactgaagaaatgttaaaagattatcaaaaagaagttgcagaaagaggtgatggttcaggtttccatgttatgggtaatttaaaggatgcagaatattgtaatgaaatgtttgatttaattaaaggtacagaaaatgaaggtttcgttgctaaattttgggatgatcaaatgatggatcttagagttaaaactggtgaaatgaagagacaaagattctttgaattaattgattatgctcatgatttaaaatcaaagggtttaccttactctaatttaaaacaaaattttaaattttaatttcattattagttttatacactgtacaataaataccatttcatttctctttatatttatacatttttataaaagcttgatctactactgcttgtttttgttttaatcttctaaaaattctttaatgtcacttttatctttggatatcatattaataaaaacctttctattttgtaaatgatcaaaatattgtaatccatgtaataatgaatcagctaaatcatcacctttaaccttaccccaaagtttatctaaatctggtaccttatactcatctttgttgcataaatttaatagtctggaaacttcccataatcttctactctttgaattatatccccatgctttctcccaactctcaacaaactcacttttcttgcacctcttatcaaaattcttaactaatccattgggtatttcaaatacatgttgattccttgttcgtaatttatctacaattgactcatttagattggttttctcaaaatttataccagctgtattcaatgcatcatgtaacatacttaaggctaaatcaattctaaaattctttgaatctttttcactgattttcactttagccatactttcatcataataatacttagattgccaataattgaccattgcacctggagcacttgaatggaaacttatgcgatttcccggtgataatcgattatgagttatcaatcccattgcaagcatcgcttcaactgtatttgattttaatgtagattctaaaacccttggactaccattagttctaaacctttgtctttcagctatcacggtataaacattgttatcttggaatcttttaggtaagagatattctcttaaaaattcatcagttattaatgaataattaactggactaaattgatattcatcataaggttctagatctattttaaaccattgttgtaaaactggcttgctttttgttggtttggatttattcgattcaatagtaaatcttgaaagtgacatgtttttcagtcccatatccagtgatattatatgctccgtgtattgatcacctggaatgttgttgtagaattgtttagtgttttcaatatctattgataatttgttcaaaagttcggcctttttcaatattttaggtggttggtatcctaatttactaaggcatttcgtcaaatctttgatcgtaagcttagtcaattgcttctctagcatcaattggatcctagagtataataaacatggaaaaataaagatcatccatccaaagatctactaattacgttataaaatttttggcatgttgatattttggtaacggtttttaagattgatctcctttttcttttccttttccttttccttttccttttccttttggaaacctttcgtttttatcaactaagcaggtgaaataatggcatatatcgtactatcgcctgaaatgataccatatgtatcaacattggtcaatttgataatgtcatgtacaccattgttatcatatggtagtactgttttgagtattagaaggaaacaatcatcacaaggattttcaattgatatttgtggtacaatgttaatttcatcgattttacgtatattttatttcttcaatgaaccatttgaattaacattattaagacaatgtttcataatggttttcattcagattattttattaaaggttgttttaaaatatcgtagtgaagattcaatcagttttgaaaaatttcaaagcaattgggagataatatttgataattttattcaattgaataaggaacagattaatgaaacgtttagtcaatataatattcatgataattataataatctgttgataagtaacttaatattaggtgtattgaatgtggttttaaaatgtgtttatttaaacattttactgattatacaatgtattttggaattatttagaaatataataaggttatttgattatcattatataagacctttcaattactggcaatggagaaattctatgacattttggaaattcttagttggatttatcatagttttaacaatattacaatttacattttatgggactacttattttgggttaattattggatcaatttcatttttaactgaaagtacattaccaataccgcaaattttattatttcaaagattgaaaaatgttgaaaattttaaaattattcttttattatcatggttaggtggtgatgttacaaagattagttatttattttacggaactgataatgtcggtacaattttcaaaattgcagctttctttcaaatgagtttaaattttattataacttatcaatttttttattataaattcaagccaaataataatagagagtatcatgatataccaatgacttatttacctaatagaacatcaatcagtagatcatcatcagtaggtatggtacaatctccaaaccaaaattatcatagaaaatcattatctatagttgatgaagttagtggtggtatcattggtggtgttactagtactagtggtggtactggtggcgatgatgttaattataatcatgataatgatgattacgattatgattatgaggatgaaaatgatgattatgatatgaataatgatagtgatgaaattgataacgctataattgatgagaagagtatacgaaatacgagttttgatgcaagtagttatgatagagaagaagttagtaacggagttgttgagaaggctagatctagaggtaatacaattcaaaggtaagaaatagtgtaagagtagcttttagattaaaaaaagaatatagaataaaaaaaggaagcagaaatataaatgtaattcaaaaatggagataaaactagaaaagttattgaatattactaattctttcatcgttttcgtcccaccataaattaaaagtaccagtcaaatcattataagaacgatcaacgttccaaggtttgggggataagatgtaatgaatgattttaatatgatctaaatcccaaatatttggatgtgcatttttaaaagttttcaaacaattgtaattatgagacagagctaaccaatcattattgaaaagatcaactaataaatcttgatctgggaatatataggaattaactgcatcagtatcattcaatttagattgaatttgattgaataaatctaatgatggattaataactaatatacctgaattacatttggataaacctgaatttgcatgtgcaacgtgagttggatgagataaatcagtgaatgagcaatttttccttatccaagttttcggataatgatcaaacttatttggattacatacacaagcatgagttgaagcaaatttattaccatttaaatccaaagtcatcagttcatctaaatttttcctaattaacatatcagaatctaattgaacaattctatcaaattgagttaatttgaaaaaatataattttgaccaagtatcaataaatcttttatctacaaggtcaatatcatctgaatttggtttaattgggtctatcatcagagttaggatattgtttttatgtaagatattcaaggcatcaatatctaattgatttgtatataatgctaccaacgggtatgcggagttgacctttttcaatgaataatttagggttaaaacaccagggagatagtctttattagtgataagtgtagcccatatacgtttatgagaggatagggtatccgatagagtgataaccgtcattgtatatagtatttcttctaattagtaatagaatttataattgatgaataaattgatgaatagatgaatagataaagccatataatgaaaagtcgggacttggtgaaatttttaaatttttaaattttttttttatctgtttgttgatgatttacaatgttccattttgatgcatttttgccgtgatttattattaatggatggatgggttttttattgttttatacagagagtacactgtgatatgggtatatagtatataatataataagatataatagatattagataagagagaaaatatggtgttaattaatggtgttaaatacgcttgtgaacgttgtatacgtggtcatagagttacaacttgtactcatacagatcaacctttaatgatgattaaaccaaagggtagaccttcaactcaatgtcctcattgtaaggaacaaagaaagaaaagaaatgctcatattgcatgtaattgttcaaagaaaattaattcagttactcaacatgattcaaattgtccctgttttgtacagggtgattgtacttgttgtccaaagagtaatagtagaaaatcttcaaagaagaaagaaaaggaattgttagagaaagaggcagaattaaatgctttttctaagtgaagatgtatctccaataagtaataataatttaagtattagtatgaataatatgaatatgaatatgaatagtgatactaataacatgaataagaatatgaatatgaatcataataataataataataataataataataataataataatgaaagtatttcaaatattttgcaatcttcttgggacatgtcatctcctccaatggggaattctgagagtttattgtcaatgttatcagatagttcatttatgagtgctaacaacactaatactaataataatataaatagtaatattagaacaagacagatagggttagatcctttacaaaatttcagatcttcctccttcaataatggtcaaaataataagagtaataataataataataataatattaaacaaagcaatcatcaacaacagaataacaagaatattaataactccattaaaaacattaataataattatcatcgtcaaggtgaaattacaatacccgttgatgaatatattaagcctttgaataaaatgaatgttacatttcaataatttcttaaataacttatctgatccatccacaattgatccttcatttactagtccaaatagtgtaagtcctcaaataaatgatcttggaattaataattttgatgttaattcattctttgattatgttgatactggtagtaataatgttaaaactaacaataatactcctactaataaaattgataccaataataccaataataataccaacaatgataataatgataataaaatggcaagtatgtttgatgtactacctccaactccagggcatggattactagatatttttgaaaataatactccaactcctgaaatttacctatcttcaaataataatactaatgataatggtgaggttgaacctgattcctttattcccattgtttccattaatcggaccgagctattcaaataatgatgatagtagtagtgttattaataacaataccaataatcacactaataatctatcacattctaatttaaacaactttaatatgagatctaatagtaatttattacaacaggcgacaattaatcaatcacataaattaaatcatgtacctacaggttcatcaattcattctaatcgatcgtatcaatcattacaatcattaagttcaaatcatagtcataatggtccattacatcataatggttcacatattacaaatcattcaaatcattcaaattctcatttccatccttattcattatcacatccacgtaggatcaagttctttcttatcaattgcttcatcaaattcaatttcatcatctgattcagttggtaattccttagttgatgaacctcaattattaactgctgaattagctaataataattcatttactggtcctcaagttgctaatgttaaaactaatacaactttaatggatgatatttatccaactaagacttatacagaaagagaaaaggagaaagataatgatcatgataatgatattaaaaataatgatgaaacaaataatgatctaatcggtacgattccaacaacaagttcttcattcatgatgaaggataaggacttttccaatattaacaaatacgatcaagaactacttgaatcactgtttcaacgatgattttctactatactctaaaaccctataaattaataatataatatataatacttacttattcacctttttttgcttactctttatttctacttcataataattataatataatttacttaataataataaaatttatctaaaataaaaaaaaaaactcttttaaactagtatttaaaattaaaaatataagactgacacgcatggtgataatattttcaaccctttctacatgattacttcttttacagcaatgagcagtatgatgcgtaaatacgtccctgatctattgatcatgacaagggatacagatcctgatctcagattcatggcattgaatgatcttgaaaaggaaatgaccaatattaataatgttggcaatataaataactctcaaattcaaacatattccaaaatattgattaaatgtttaaatgatgaatttagtgaagtacgtacacaatcattgaaaagttttccaaatattaccatcaattttaagagctgatattgtctctattattcaacaattattagtcaatgataaaagaaaaatttcaattacttcaacaataaatacaatggcgattcataacattttgaaaaatttacctaatgataaaaacattcattattcagtaattgaaactataatgcctaaattattaaataatagtattcaagatattcaaattgatgaaattgaaatcttgaatgatttggttgaatataatggtaagtttatgagtaaggaacagatctcaaatttattaaatttccttattgatatatatttctatgctgatagtataatatcaaagaagtcaatattagcaattcatgtcctaattggtaagattgataataaaaatgaaaatttgtttattattaaactattctttgataaattgctgaataacttataataactatttacaaaaggatgaaactcaatcaaagataaaactgttagtcatactatctgcttgtatcactggtaatccaatattattaaatagtagaacttcacaaatttggaatattgctatagattgtttaaatattaatcaatcggatatagtagatgaagactatgaagttcaacaaaatattgatacaattagatatgaatcaattattttgatggtcaaactatttgaaaattgtgataatgactcaatagaatctctattaaattattgcttatcaatgtgtcctttgttaataaattatgatccttataacgataatgatgcgaatgatgaggatgatgttggatctttcgataatgacgatgaggatgatgattatagtgaatacgaacaagatgatgacgatgatgatgatgataattgttcatggaaaattcgttatgaaactttaaacctattgattgttattattaaacattttccaatcaaattgtcaacattattcaaatacaactttaatatcttaatggattcattacttaaagaaaagaataaatttgttaaaatcatgctacttgaaactctatctttggtatttgctaattcctctcaagatggtatttattacaatctgcttaattcaaaatccatggcagagacaacttacaggtagaagaaatagtgatgtaagtatgcaatctgatgatgatccctacagtatattaataaataataatgcaaaattatgtcaatttatttatcaatttgttgaaaataatggtgatacaatcggtaatgaaaatgttaatgttgttatcaaactcttgactaatttaacaaatgccctagaggttttgaatactaattatacagaaaaatttgttgttaaaattaatcaactatggaaaagtacattgaaggaatctggggtaactacattttatttgacactattgaaatatgaatcaattgattcattaggtaatggatttcaatatattgtagagtatattgagtcttgtttatcaaatgatttgaataataaatcaattactgatggactatctttgatcaatttaatttacaagaataatttgaaactaaataacccatctatcaatcaattatctgaaagatttactgacgtattaattgaaaaatcattaaatagtaatttatcaacgaatatcagactttcatctattgattcattggtcatattatgttgtaatttgaaattgtcaagttcaactagtgaaaaagtactttttatgtttgctaacattataacatctgaagttttagcattgacaagtttagattctataagaaaattgattgaatctaacttaatagttgaatctatgacaaggtgattgggttaaacaaattttgctgaattgtttagaatatgttcatattgcagaattaaactcatctgctatcaaactaattaaattatttgcattatctaacttagttgatgaatatgaaggtagacttaatattaaactcaattgagaaattacatacagagaaaaagtttaatagttcaaattgtgccgatattggtgaaattatgaataaaatcttgagttttgttaatattactgataatttggatatcataatttcaatgatcattgatttaataacatttgataactttgatgatatttcaccttctctaatgaaacagttattacaacaaacatccgatgaaaatatttctacgattattcataaatttggtgatataactgatcttaagatttctaaaattcttgctgttttaagtgttgcatctggtaatgaattttcaattggaactgttattgagaatttaaataacgataaagatgtttatttttcacttgttttcctcaatgaagtttccaaatcaattgatatcaatataggtattgatattttccttaaagaattaatctcaaatcaggcaaatattgtcaacatctcaattaaaatcttatcaactatcatctctaaatatcctgccaaatacttagatgaatttttgaataaattgatacagacagctgatacttcagattgtcttaaagtgttatcaaatgttttggaaataattgagttaaacaatgaacaggcgatgagaatatttaatgttattattcaagtccagctttcaactcctgttaagatatcaaatgagagtagttatgaaaacgcatcaatttgttttggtatattgatagttaaatatgatctattggacgcagcattggaatacttagttaataatacaatcactaactgaaattttgctagcaagtattggtaatagtatcaagtactcattcaatgatgaaaagtttatagaaaacctgtctctccgacaatcagttaaatactctgaattatcggtggaaaaattcattttccataaaaacttatttttcaaacaaattgcagtttccaattttaatttaatattgaataaactaccaaatattgcaatttcattaatgagtaaaataattccgggaattatggaatctgaaataaaaccgaataaagattatatacatacacaatttattggaccttataaacataaaattgatgatgggttgagttatagaaaacaactatttgaatcaatttattattacttcaaaattttagaagaaaatagaaattatttacttttaggttcgattaaatgggaaatgtactttaataaatattttgattgtggtgtcaaggatgatgaatcgaatagtttctgtttgtttgttaacaactcttaaattatttgaacaagatgggcaatttttcatgaaagataatggtgaaattgatacatttgatggatttttctcaagatgtcgtaaaacaataaataaaaaaattgctgataatgcagttaaacaagatatagaaaagcaaaataatatgattaaaatgattattagatttttaaagaaagttaatatattggttgaaaataaacaattattattgaatgctgcacaaattaatgattggaattcattgattactgaaactaagggctaaatatccaatatttgatcaagaagaataagtttgaaaatatttcacacactttcttatttttcgatttttataatgatacataaattttgtaataatcaatagttagacattaatatcattaaaaatgagcagagacagaagaagaatagttttaataaaaagaaacattggcatgttgaaatgtaaaaaaagatgtgggctaagaggttcgaactcttgcatccgaagatatcacggcctaaacgtgacgccttagaccactcggccaaacccacaatccttcaagttgtaagggaataaatacaagttgttcaataatatccacgtgaggattaggtaagctgattacgtaaagatgataagatggaaataggaattccgagatacggaggttcggagatgtcggagtaagaaaggaatgacttagattgaaattgaattaattatgataaggagtggtatgattgataaggaatagtttaattaactatattaaggaatggttaatattgtaatataaataagtatgatatcctgtataactttgtataactctcttctgagaggggacattaatcagagtattagttagagaacaatctactaattaataccaaccgtctcattgctactcgctgtctattacacaaataaaaggtccaacgagtaaacttattttatacttattacttccattacgtaattaagtattatccactatcttacatattttagtttacacaagtttacctttttagattttttagactgttattttgtatttgtcacgtgactttcaaaaaagtgaaaaacatgaattatcactttaattaatgactacaatgtagcatagcacatgaataatgtaatttattaatgagagtagcttttgaaaacttaaaaaaaaggtttttacatcattttaaattttttaattttggcctttttaaacaattttggatggttaacttttgcttcaaaattttaaaaattcaaactccaactttagtgtaaaaaagtaatattaaataaaaaacaataaaatttacaccttattacatattaatgaaaatgttcttcaaatttattcaaagcctcaaaaaatcctgcatcccattgccataaaaatctactgttgcctcttgctttagtatgttccattcttctagcataactccaagcaactactcgcccgattcttgaattatcaagtttcaaaaaagcaactgaatctgaccatgcagtaataaaaccttcttgatatctccaaaactcatatttttcattaggattttgacttgaccaataattttgatgttgctggaaaatattattaaatatgttatcaaagtcttctttggatggttctcttaaatttgtatttcttggtggaatacaacctctatctatcataggaacaattccccattcaccaccatcaccattttgaaatttgaaagtccaaaaataagtaccagttttagcttttcttttaaatacttctgtttgtttgttcccgtagtttttgaccaattcatctctatttgcatttcctgagttgttccaggattgggtatctaaaacacaagaatactctccaataataaaatcagcattatctgctgcttccggtataacagaatttggaaggtcattagttatatcttcaacacgtttacgcttatcatcatcactgaaacaacggtaaatgtggtcatcaattacaattcctaaacttcctatattaccatttgattcacgtgaaagaaaatcaatccattgtttaggccaccacccgtcactgataataattggaatgtcttgattatattttctaatttcatttgatgcctttctgtagtatctttcttgtccacttggattatttgaaaataccgattcattaactatttggagtccagaaacattatcataattttttaaatcgttagcaataaatgcacagacgtcaactgctaaatcaatagctttatgatcattccaaaatcctgcttctttaagagtttcaccactatgatctccagtatttgcacctttaggtaatccatgtaaatcaacaagtattgaaatattatactgtttggctttattaatatatttatcctttaaaatattccatgcattaacataaacacctgatattgactcaaagtttgtgcctctagtaaattgaccaccattaactgtccagtaaccaattgggattctaattgattgtattcctttacttttaagccattcccaatcactatcagaacaataattcaaccaatgattctccattttagttcttgtggcatcaattccattttttctaacataacttgctattgcttcacattccgcattaccaccttctacatacatttcatcaaaaatatatttctctaatacaaataacgaaccaaaattaactccgaagttttgtcttgattgataaattgatctctctgtaggtggacctccaacaggagctgcaggcgctgaatcttttatagaaccattgttcaaagcatttttcaaatgtccaaataaacccattatacgtttttttgctggaaagaatgtattcatttctagagaactctatttcaatagaacttcaaggtgaattgatgttggtaaaataaaactgctaagccaccaacaaagtcgcgacttttatttggtaaagaattgcacgtgtggacgggttgggatcccctggaaagatgcatggtaagaacagctcttcatcaaattgatacttcttcgtttacagtagcaacagatttaacacataccgattgaacgggaaacaacacaatgctttcatctattgtaaaagtacgtagaatttgaaatttgaacacattctgaaaacgaattaatcgaatgaactcattactaacaataccccattttaacagtcaagtatatttatcacatcttcatcattactttacgtatccagtcgtggaaacaatacggtcaaatgtgaatccaagagaactttctataacgatgacacagatataaatgcagctgtaggaaaacctacagaacctcaagttccaaaattactacaggaagaacaatcagttgaatcattcctggaatcaaagattaaagttgcaagagaagaactctacaaatacttagaactttccaaaaatgtatatattgataaatctgaacaatactttgatacagaaagagaaattttttcaactgtaagttcattacatgatagaagagaagaatttttccctaatgcattatatgttttaactggtggtttatttggttcagttttagctagaaaaagaaacattctttttagatttatttcaccagtagtatgtggtttagtttcattcaaaatatttttcccaaaaactttcggtaatgtctttggatatttagatgctgctgaaaagaaaaacttaccagatgtttactctacacaaactgaattgattaacaaagcagaagaattagttaaacaaacatcacaaaccgctgaatcaagttctaaagaagtttcaagtttctttgatagagcaagaaagacaatcggtgaatatactggattgaacgttgatcaagtagtctccgaaaagaagaaataatcttttcattccatttggttgtagattatgtatttatcccgtatatagacttattatttacttactattcaatttaatgaactaactttatttaacaagctgtcatataaaaatttattatctatattgtctacgtaatgtatacagaagaatgacattattactcttcatcagatgattcttcttcttcatcagatgtgtattcttctgaatcatcttctgaatcatcttcgtcatcactgccttcatcgtcactaccttcaccatcatcttcaactgagatattttcaactgaaacatcgtacatcaaatccttgaagaatttttcaatatcacccgccttggatggattacaactgataaaacatgcacttgtcttaggatcaaataatggaacaaaatatttattgaaaacttcaactaaatcagcagctgtaatttttgataaagctctcataacctttccattataatcaggtcctctcttaactaaaacatcatcataaaattgtgctgttgcggtttctggataattagattgggactctgcaattttgttaaccatactactgattgcaccttgacgtaaactatcatcaatcgctacttcaccacttgcaaatcctttaacaatatctcttgctgctgaataacatttttcaacatctgcccctctgtaaatactgaaacataattcaccgattgatgttttattataacaatttgcaccatatgctaaaccggcacctctaataccacgccagaatggaccttcaacacattgtaaatattcagcgccaagcatgattttaaaggtatcatcagaattatattcacctaacggagagtttgtgattaaattcatataacttgaatcagatcctggtgttgtaagaatgaaacatttttcagatttttttctaccaagttcagataaagctaattcttgataaggtaattcagtgattttatttgctttactagataaaacagagttgaatttctcccaagatgataatggtttctcaagtttatttatatcaccaaaaatgactaatctcatattagaactatcaaataatttgtttctaatttcttccaaattcttttcagtagtttcaaaatcacctgcctcaatttcattaagaaggttttgtaaatattcttcatgatcaataatttcacttgatttgatggatgatctttctgaatacatgtgtttattagcaaggtatctcaacatgtaactaccacttctcttaagttcaggtaaggattgaattagtttccttaaagcaacgagaactctttccttggtgaactttgttttaaacaataacttaatataccaatcaatagcttttatgtaattttcatttttaacagtcattgacaaagacataaattcctcgaatctaccattgaaagaacttccaaaattacactgaatagtatctctcttaatttgtttaacaacttcttcatatggaactaaattattgtcttcactgactataggtaaggttgtaatagtttcaaaaactctaagtaatggaagaagttttgaatcaagttcaaaagttgaaaaaagaagctgaatacttgtgaaatttgattcatagttttcaatatgaacatacattgggaaatcttctggtacatctgcattcactaaatcaacacttttagaaggtttgtttgttaaatctttattaagaccggcaacaattgattctgttttaatgaattcaatactggaaggatctggtttttggaaagagtcaagtatttcagctggaatttctctgtcattaaatttctgcgcagcttttaatttatcctctaaagctttcaaaccttcaacacctaatttttcctttctttctttcaaaatcttggcattagtagcttttgtttcttcataaagagcttttgaaggtttagcaataacaatagcacaatgattttcaacgaagtatttttgaaaaacatcaacccattgagaaatatcccaactcatcaattctttaaattcatctaaagttttacaatatctctctaaatcttcaccatttgttttaccatattcaaattcaaagattgaaacatacgaaagagtttcagggctcttttcagctctatgaacaaatttccacatagtttgatcaaccaaatctctaagtctttcaagatccaagttttctttagtaccatgagttttcatcaattctaatactttagtagggaattctgataatctttcagtaggaacattagaaaaattgatggccattgaacttaaaacatagctttcagtgtagaatgaggagtctgttgtccatggatcatcgatttcaataaagttttgactgaagagagaaactgaagaagaagttaaatattttccaaggatatcaatagcttgatctaagatagtatctgaagagtcagcacctatccaagttaacatgacttgtccagaagattcatccttatcagggaaggaaacagttctagttatagtttcagtcaatggtaaatctcttggagtgtcaacgaatggtcttaaatttggaacttctggtaaatcttgtaattcagaatcaaactctaccattaattctaacagttccttttcattaacagaaccagtaacaataatacataaattatcaggtctttaattatcagcatggtactttcttatagtttcagcatctaatgtacgtaaattcttagtcaaaccaccagtttctgatttataaccagatttagaatacaaagttctttgtgcttctaaattttgaataaaccacgattgattttcaataccttgcatttctgagtagacaacacccttttccttaccgtcaccatcaacatgataaacttcagtataacaagcttcatcagtaatagtcggattgaataaatgatctagataaacaggcaataacattttaaaaccatcccaaccagcagttgaaagagtataaacagtttgatctgttgcagtccatgcattagttgaactgaatgctaaattaccaagaatgtctaataaacctttataaggatattttttagaacccataaagatcaaatgttctaaggtatgtggacaaccactatcattcaaaatttcagttgcaacagcaaaataaccgttaacaacaggagatgcttgatcaatcagggttacttgtaaaccagtcctagttgatctccattttttgatattggcaggagcataatcaactttaaaattactctgttgttcaaaataggaatgtgccattcttttgaatgtttgatatctacctctaacagacaacttgaggtactaataactaattccaagaagaaaaaaacttgtacttaagcactgtaaattgtgtaaaagtacaggaaaaattatgtaatcatttcagaacaggttagacataaaataacaattaacagaacggaataagattttatgctatgataaggtaaagtcataatatatcagatgactataaataagaggacatatccctaattatacttttatatattacattatataagttagttcatttactaaccaaaactatattaagttatgtattgtgtgtaagatattatacgaatatattttactaaagtcctaataacaacggttacaatgtctcacgttttattgtaattttacagatttacagtctcggtgttctttaaaggtgtttcttcaactaaatggaataagacaaattaaatattaaatcaaaaatccggttatacaaattatgaaaacaaattattataaaacaaactattaaaaataagtccttcaagttttggttcttcgtatcaacacattaacaatacataacattccattaaaatttaaaaatacaattattatggcaaaacaaattaacaattaaatatcaattatattatagcatttattaatttatatgttaagaaaaattaaggctcatcattatttaatcacagaatactttaaacagaataatgtcaacagaacatttttacaatatgatgcctattatcaattatcaattatcaattatcaattaagccaattatcaattattaaagcaactactatatgtcaattcaattacaactattaagcgatgtcaactattattatgaaattacattattataccaaattcaattactattatattaaagtcaattattattatgtcaattatctattattatgtcaattactcaaagaagtttattattactattacaattattactattatgacaattattattataccttagaagaaattaagaaaagtttattactattttattactgaaagtttattattattatgacaatttattacaattatgacaacttattacaattattattacaaatttaacactattattatgacagcttattattaagatcattatgtatgatgatcatttatattttacagattcaattttcaagactatttcaactatttcaatacaaagatagaatgacatatggtagaatacgctattatcaccgagtttacacttacatatcaaaaagaaacatctcattatttcattatattattatcaattattaatcaattattattatcaattattaattaattattattatcaattattattatcaattattattagctagttattaggcagaaggcacaccggtttatttacaaattattacttaatcactatattattacattattaccaattttattaagatactacattattaaaacaattattactctaatcaaatcaatattatgatcactactatcaatgttgaacaattattactctaaatacaattattactcaaattattttacatattattacactaggattataaaagctattaatgctatattaagataacttattaaagactcgttacaatactgcacaaattatcagttataaatatattatttatcatcaaataaatggctcattcgaactaatgaaaacagaacagaattatgacttgtgttacaaaattatcaatttttaaaattttatcaattatgtgcaggttcacataacatttcaacagctaacagagaagaaattatgatgttatcttatgcagttacttagctactaacatacagagataatattatattttattattttactcaattacatattattgagacatacacaagcaattattacatattatttaaataattacatactattaaaacactgtttattggcatattattactattatcactattatatttacaaatttaaaatttcaagtgaaattcaagccaatttttttttaaggagtcattagagaaaatacaaatattgattagagaaagttcattaataaagaacatttacaacttattactaacatttattattactaacatttattatcactaacatttacatttattaacatatatgattataaacatttaactaacatttactatgaataccaattatcaagatcacatgttacatatctaatatctaagatttatcaaaaaaaaaaaaaaaattacttaaatcaatatcaagattatttaccaaaaccagttagtaaagtttacagaaattcatttatcacagaagctcatacattacagaggcacatttatcataaaagcctatttatcataacattacatatttaatacatatatatatatatatatatatatatatatattatattataggagctatttatcaaacaccattcactatttgcagaatgttattgatcaaattattacggttattacttatcagaaattacttacagttcttatatcactacgttattcattcaattaaataaatttattattttaggaaatttaaatttaagaagttgctattattgaagcaaacatgaaattattatcgaaattattaaatattaaaagctagttaaagctcattatcaaacttaagacttaacaattaaaacacatttattcacaaagctttacttattgaaattatctcccgaatccccatatcaacattatgaataaaaatatcaaatatcaaaacatttgaagtatcaaatgagggggagaattattacatgatatttattatcagaaatttacaagacatttattatagtacattaaggtggtccaaattattaaaattattcaatttacaatttttctaaattattattaattcattatcatataaattattactaattattaatacactaaagtttagtttcatactccaaactgcaaatttatcatattaagaacataaacattacattaatcaaattgttacattaaagcaataagctcatctaagaagtaaagaattcttcaattgcaggggagaatattaatataatacaatctcagaattatttacaagattaatagttattacatattcaagtttaacaatattatctaattaaacattatcattatatcagatacatgtcaagatttaacagaacactattatctaaatatttaaataaatattataaatcattaacattatcaaatcaaatataataggactaaatcagattaaaacaaatacatattttacatatcaaacaacttacatattacaagtaaagagtacaaataataagaaattaagtaacatacaaagttatactaaatacaataagattatattaaatacaaaataagattaaattacatacaataggattaaactaatatcaaatatcaaagagatatactgaaagtcaagtactgaaagatacaaacaattacaaacaatattattaatctatacacacaatattaaggaacaataaataaaactcccagcacaaatataattaagttaaaattactaaaacatacattcaatagttaaataaatatcaatatcaaatatatcgaagaatcataagtatatcataagaaaaattataaatcaataaagatcacataaagtatatcaatgcacattaatcaaagaaatttaaatcattcacattattaagttataaattaaattattattaccaaagttatcacacaattgatattattaacaaaataagtgcatattacattacgagaaatgaaaacttaaaattagcatgaaagttacattaatattaaaattattaaaattattacaattaggaattaaaagattcaaaaattatatttaaaagatatcaaatatacttaaacaaatcaagatcaagaatacagatatattatgatttaagggggagtgtaaaagtacaggaaaaattatgtaatcatttcagaacaggttagacataaaataacaattaacagaacggaataagattttatgctatgataaggtaaagtcataatatatcagatgactataaataagaggacatatccctaattatacttttatatattacattatataagttagttcatttactaaccaaaactatattaagttatgtattgtgtgtaagatattatacgaatatattttactaaagtcctaataacaacggttacaatgtctcacgttttattgtaattttacaaattgaagccaacatgaaaaaacggcaaattggaaaaatttcatgaaaatggaaaattcccctttttggataacttcctatttgggaaagtaaaagaagtttcccattttctgaagttgatctttaacgtaaacaagtactttccaattatcttgttattatgtacttttgattctttccggaaattttttaggacttttttatttttaattctatttgctatctctaattctattttgattctttagttgactttagttttatttaattagtctcttatcaataatatttaaaacaccaatgagttcatcaccaacaaaagttgcagcttttgaatactttgatccatcatcagcggagtattcggctactagctcctcattaaatcaggcaaattcaggagagagtagccctccaattccatgttttacaaatactttcaaagcaattgaaacacaagaaaaaaagattatcgaaagtaatggtttactttcaaatttaagacctaagttggaaaaatttggtgctatgaaaccagatgaggttagtgctgcaaatcttaaggcaagctttagaaaaattgctaaacaaatgcaaatagcaaacaaattattagacgaaacaaacaaaaatatgtgtgaatgggcaagtacatttgaatctgatgaagtttcaaaactttcttttgaatttagtaaatacctacagttaaactataatatgaatgaaatgatcgctgatagatttgagcatattggatttcgtttaaaaaccatctcaaagcaagaaaatagaagagatcaatttgtcataaaaaatataaaagctaagagagaattagatcttttcaagaagaaaagtactgatataaacatgacttccagtatttatgacaaacttaagttttcaacttcttcattatcatcagcacaaaatttattagagcaaagtgtcagatcatcattacgtcctgctatgtttggttatgtttatgtattgaacaaatattctaatttcatcaatgagttgagtagaagcacaactatggatcttagaagttttgaaagaaagttagatcaacacgattcaattttaagagaacaacttagtatttcagattcaaaatatttgaaaaaaccttgctttgatattgcacaaaaatatgagttagaatataaggaaaaagtatccagggaaatttatagtggtgaagctggaaaatcaggaatttcagttgataatgcaatgttaagagcatctaaacaaactgaattggatactgatgaagaagaatctgaagatgattcagatgatagtaacactgaatctgcagaaataattgatacaaggaatggtacttttacattaggggaggcttttaatgcaactcttgctccgccaaatcttaggaggaaaaaaggtaagaaaaagcagaatgcccaaatcaatacttcagaaaatcataccctaaaagtagttaatgataataaaagtaattgcaacgcaacgaaaaatgcttcaataacatagatatcgaaaacacttttggcaaatataaagaataaagaaaaataagttaaatgtgaaactctcgtcgaatgaagtttgattatgtgtaaattatagtataagttttggtagtaatgattgaatttttgtaatattaaaaaaagaattagttaattgaagaaagtcatagtgattataattttttctttatattatttattctagcttagtaaaaatcaattttatatatttacaggagttatgatacaatcatgttgtcaactttattcttgtagtttcttatctttaaaaaacttcttagtcatttcataactggatatcataatggcacatgcaggagcaattttcaaacaacgtggtatcaaaccaacatataatgcaccaaatccttcatttttataaatttgtgaaatatatctgaaaatagtttccttttccttacttttcgtgcttagagtgcccatgtttttactatcatcaaaggaaacttgcattcttgttttcccaacatcaaaaggatttgtaaatatagccgctgttatacctgcaattgaaccacctatgaaagatctaacaaataaagctgcatcttcgcttaatatattagtttgttcatctagtagtgattttgttttcaatatatgtgtgacatattcatatgttgaccaatatatcccactaaatggaacatctctccataaagttaatcccaatcctttaaaaatcgatgaaacaccctttgattttaattcatctaaggaattttgaacaaccattttgaatacttgggatgatgattttggtgttgatccactcggaacagcttgaattctagttttgattaactctaatggagcaactgtagttgcggcaagaatacgggcaacagatccacaaattaaagggttcaaaactgggaattgttcacgtaaaggggatgagtctcttaaaaattcataaccagagaaataaaccacattggagggtatagccattaacaatgttatacctaatccacgataaagtgttcgtactccttcatctgttgcaattttcttcaaaccttgaaatgtaccttctattttaccaccttcatttaaacatgcatttggctggcaaaaatttcctttcattgatccaaccattttgtcagttgataattcccaaaatacttttctgcaacatgttacatcagatgtctgaacagggtataaaagctcttgttgttgtaatctaattctgacaacatcaaagggcgttacgactaacgatgtaagtaatgatccggtacatgcactcaacattcgctgagatagtgttaggtctcccgtacttttattcctttgtgttatcattgtattattttcattattttgatactttgagtcaaaatcatgatcaaatacgttttcttcttcttcaattgcacctgcaatctccgaactcatagccatcttttttgactttgattaactttttatttttggtctaaaccgttatattttatgaatattttgacaagaaaaaaaaatctataaatgtgtatataccaaaggatcaattatttgacctttccttaattagtttttgttaaatttagaaatatattactcaatttcaaaagcaacaccgtgtctactacagtagaaattggtggagtcaaaatccaaaaaatttaaatttacatgtgccacctcgaaatttttcagagaccggggatttgactttttcttggagtttacctccggactcagttagggaaactcttaccgatgttctttaactggtatactcttgatgaacattgggagagttatcttatggtatcatatccacattgttgtagagaagtaaggtactatatgatcactctttgttgaactgctctttataatcgttagctgtgataattaacttttattggcccgttatctccgacatagatcggatgttagataatccagtattttatcttgatactaataacatttctattacgtatatttacacaaattaatattacattaaagatcaactataatcaccaatcaattcctctcttgaatagaatgtatcatccaaactgttctcatgacattcataaactgtaatctctgaactttgagaataattagtagctaacatcattctgtgtggatgtaatgcaatactattaacaaatgatgaattactacgaactgaaccattcaatgtgttaataaatcctccattttcaatagatgcaatctttttacccatagtactgtaaatatcaacttccttattggcacatgcaataataggagcatgttcatgaataaatgctgtcatcattgtcttttggaatggtttaaatttgagaattggatcatcattacgaatatcccaaagttgaactaatccatttgaactaccactaataagttcacgtaatccacctctttgcatatgcacatttcttataggtgctctattaataggatttttaggttgataaactttaaccattgaatcttttgaatcaagtcttctatcatagatacgcattgaaccatcttgaaatcctccaattattatattaccactaacttgatcagatgtcattgttaatatctgtgatgttgatctgattggaacatcaagtatatttttctcccttggtgcatcccatactttaataactttagtatcaccagtaaccaataatgttcctctactttgttgccattcacttaataaaccaacagatcttggtgtaagtatgatatcagtcaaagctctccatgctgttaataattgacattctttttcattgttgaaattcttgtaaattctaactaaaccatcacttgaacctgtcattaataatggcacactatcttcattcaaaaatcttaaatcagtaattttagttcctaatggattaccatttgataacttactcaattcagttcctttactccagtcaaaagttgtgatattgtctctttcatcagtagttgccatccatttttcaaattgggtaaattttattaattttggctgggtaacattattaagttttgatacaacatttttccagttaccagtcaacgccatttccttttgtaattgagtagcagcaatgatagcttcatttctatttcttctccaaattcttctcatgtattctttacttcctggctcatcttcttcctttggtcccaattgtgattcttggaaatattcactactgtaatctaaaaatccacttgaaaagggtaatacaggatatatattctctctgtttcgaggcttaaatctgtaagtggtaggtttgatatttgttccatatgaaactgatataggttgttgcgataataaatttgtcaaagctgcagttttggagttatcgcctccatcttcatcatacaagttgaatgcacttaaccatgatctcaaagatgagactttattacttaatgaaaaatggtaaattgaagaggaagaagatttaggtgccaattcatccgattccccatgcagtctcgaatcaaaattagcagattgaactctttttgcatttttattgtgaacattcttcaaatttatttcggagttagttccaattttacttaacactgtttgatccatagagtctgagcttaattcactagctttattttttaataaataactttccattgtagaaacaacatcactaaatttggattctcttaattttagcataatataatcaacaatttgttgagaataattctgaacttcatcatgtggatcttcactcaggactaataaaattttccatactgttgaaaaaattgaaccataagctggtgatcttcttctaacttcatcgataattgaaggattatcaagtaatgtaatctcttcttccaattgactaaacgcactgataagaaaaaatggtaaatatttaacaacaaatctactcattaagcatagaacttctcttcttatcaatgcagaaccatcattacacagtgaaaccatctctgtaacaattttcaaatcttgcttattgagttcatcactaataccatagttattttcaagaccttcaacttcacttgtcaacaaaataaagtttctgaatgcaaaaaccaaagatgcacgaatttctggaattggatcatttaacaatactagaagtttatcggttgatccacttctcataattattactactgcctccaagtgttctttaaccatttcactaattaacaatgcactccattgtctcaataatggactttctgatgattctatataaccaatgcaacatcttaataagtcaatagaaaaaacaagctttcgtccttgttcatgatctctaacaaacattgttaaaacaaaagcactcattgccttttgatcagcaaatgtgacatcattattcacagcggaactttcaataactaacggattaccatgaagatgaggttgagatggacgtggttggagggttaacataccaataaaataattatatcctctatccttgactaattcttgctgtgtatttttatagtcaactgacataattctactccaaatgaaaacaaggataggtttcaaatctaacgaaggactctgaagtagtttttgaatatatgggaacatacccacacttaatgctaaatataccgcccatggaccatgatctaaaaagtttgataataaatgcaatgctctgagtctatgtgcttgagataataaaacttgtaaaacaattggtagttgttgaggtggttctttaattgctgaaccatattgtaaccagacctcaaatgcagtaaggtgctgttgaaaaaatgtacagtgttgataattccatggattttgtccgttaggtaaggatccatttctatcatttgtagttccgttacctatgttattcgagttgccattggctgcttttttatcaccattcatttgatgtatttacgacttgcaattggggtatatctgatagatctccaacttcaggttcagatgcctttttttcgagaagttgacttaaaatttgatcaatcgcaagttcccaagaatcccacattgagtgtttatttatatctggtaagggtggatcagaaataggatgacatccaacttctggcatgatctttttagctaataggaaatttctaaacaatgcagcaactaccaaatcttgtctgaaaagtcttttaaataatggtctagataatgttgtccatgcaattgtatcagtgacagcaataaatatccaatttaattcacccaatggagttcttctatctgttaatttaccgggtatatcaattccaccatctttattcttcaatgcctcataatatcccttttctcttaatggagaatacaaaatgaaccatttaatactcatttcaattggacgagttaaacaacaggtaaataaatctgctggtaatctggattcagtggtaaaatttcattactttgacaagcaccaagttgtatactttcaatgtaagcactaacaggtgaaggtgcagccatatcattatgattatttgcttcatcatcaattctcttttgaataaatcttttattattttcaataacacgaccagcaggcatttgcatcaataaccataatataaggagcaccaagccaattttgtaaatcatataaactaacaggtatatattgagtataacctctattgaaaacccaaatttcacctgattgtgtaggttgtggaacaccatgtccattataatgaaacaatatacgctcatctttagcatttctcctcaaagaggtacacaatcttttcaaatcttcaactgatggatctaatgattgcttatatttcgccctagatgatatagattcgtaattagattgtaatgatttaccaatggcttgtaatgccatttttgaatctggataagttgatggatttatgaaagattcctaaataagggtattcttgtggttttataacatctggtggtgggatacctaaattcagacacagtactaatgctgccattgtggttttcttcttgttacctgtgtttttccaatcagatattttataagtatcatcatcttctgatggatttgcagatgttgtgtttcttttcaaatcaaagtgtgaataataatgtagttgaagatcatctaaaaaatgggagtcattaagaaacccatgtcgtagctcaatggtcatccttctggtgtaaaagaaaccgttgtttctatgttaaaaggaaagaaatactgtgctgacaatacatcgaattaacagagtgaagattggaaattcaatattgaagagagggaggtctcaatattcaaaaattttacgtcatcaacttaaccttttgtttattccaattcttactactattattatcattaaatttttataaatacagtatacagtaaacagtaaggtataacaacaaaataaatataaaaaccaagcctatatgtcaacagaaatttgtttgctatgtccattgacagtattaccacgacttctattatttttaatacttttatcccaaaaatcaagtgatgcaacaacatcataacctctttcattttcatatacataaaggatttcctgtgatgaagcatgtaaaaacctaatattttctccaacaataacccttaataattctgcattttgaacactacgaatttcaatgaaattagtatcaaatgctaataaatatgggtaccaaagagcaaatgaatgtgggacaccttcccattcaatgatccatttaggtctaactctccaaccattatgattaatgaaaaatgaaaaattagaatatgaaagtaagaaatcactattgattctatcaatacttaatggtttcaatccttccttacttgttgcaaattctaatgatgtatccgcaggatctaataattcttccattgtattattgactaaggaaacaatttggaaaccatttgcacaaccaacacataatttagttttaaggaaattgatagaaactggttcagatccaaaattgatatcttgtatatcattttcaaacttcttcttttgctttttctgttgaattggattaactggttcaaatatacgaacaatattagatgtagatttagctgcacataatagcattctaccatcacagataccaattttaaaaaatgatacatgattcattaactcttttcctaacttaccatttttaataggatcaccaccggctaaaacactagttggaccaatataataatttcttatcacataatacaaccaaaagttgatattcttggaattatttcaatttgtataatattaaatttattaatcaccttaataatagatccattaccagtaactatcacttattgttctatcacttatataaattccagaatctgtaccatataataatttcctaccaccatcaaagggtataacacagttaattttattttgtgaatcaaagaaatttgatgataatggagtcaatgtataaacatcattatctgccaaaattttctttgtttgagcttcgattttatttgctaatattttttgagtggcaggtgtaccatataatgttaattcataaccatgaacacctaaatatttaaatgataaaggagatttagcaactgttgaatttaatggaatcagagaagtagttgaatttgatagactattacctaacagagaaggtgatgaacctgttgtcatagctgctcttctgattgattttatagttggaggatattctgtaagtgaatagtataataatggtaaaggtattggacgctgataaactttataaacttctcttttgtttaaataaccaagtttaatgaatagaatacaatgatcaaataaataaacatgaatttcaccttgcttttccttttcttgataccctttctttttcaaaacacattgataaataacttttctattatcagcacttaattttaaatcaactaattcaccaggtttaaataataatttttgttttatttggaacaaattcatcttatcagattgtttaccagtttcaaaattaatctttgttaacattttctctaacaattcaattgcttgagttaattttttataatcaggagagttctcatcagtatgatctctaatacttttcaataaaagtggatatcttgcaggtctggttgtaggttttgataaaaatgatgataaatctaatctcttagattcttctcttttagctgtatcttcaataaatcttcttaataaaggattatgtcttctttgtctatcaaattcatatttaccaataacttgacctgcaccatatgttatgaatggtgtgaattgtgggataaaatcaaggaaaatgtcagcaattgaatcaacaattggagatttttgttgttgtctaactaaagcttcagcaaatttatgattaatttcccaaatttcattaatattatggaaaacatttctaataaattgatctctttccttatctttgataattttagtttcacttaatggtctcatccaaaattctctaatatattctaaatctttaataaaggttttttcagaattaatagtttcaaaaatacattcttgtcttttaatttcatttttatctagattttcaagtaaacttttaggtactgttaattgccaatactgtttttgatcttcttgatttaatgaaatatgagaatctgatctaattaaacttgaagaactttgcatttctgatctcattttttgttcaaatcttcttggacatgaaacactataacaaactttatcccttgaacaagtaggtgaataacattcagttaatgaaggtaaaaacaccacttataatattaatcgaattattatttgtaccatttggattagataatgtaggtaattgtgcttcactattattattagtattagtacccataattgttaaattacttgtaattgaattttgacgtttaaattcttcattttgattattataaaagaaaacatcattaattaaataaatttctaatttattatctctcaatctatgttcataggtaacatcatgaaataatttttgagaatctaaacttctacctaatataattgctaaatttctatcacgaattttagttattttacaaataacatcaattgcttcagaacctgaaaatgaatttctatattcgataccatatttaaaatgacaagttaatttaatttcatgaagaaaagcatcggcaacttcagataataatgcaggataaatatattttttctttaatgaaggtgatgattgtattacagtacttgataatgaagtagttgaaataaatctatttttatcattatttgaacgtaatgaagttgatgatgtaacacgtcttgttaaagtacttaaagatcttgattttttaggtgaatcaattgatggattattaaattgatttgaataatcaattttttgaggtataactctaccacttgaagtagtttgtttgattggttgatgatatttttccatttctcttgatgaactatgacctggagttaaaggagaatctggtggaaattgattttgattttgatattggtattgattctgatacatattttgatattgatattggttattattattattatcatttgataaagtaatatttcttgcatttttaaggaaattaagagattgtctaacaattggagatttcttagttgatgaaggtttattagctgttgaaggtggtgattgattttgatcttgtaaaaatggatttaccattgtagatgatgatgaagcagatgatggagatgatgaaatacctaaactatttgaaccatatgagacagatctattacttgaagtatcaactcttaaattatcacgtttaatcatttctgaacctgaacgttgtttaacatttggtctttgattattattatttctatataatggattataagaatcaggggttctaggtaaattttcatctctagatcttggaattggtggaattgattgaattatcggtgcccttggtaaaggtggaggtatttgttgattagggtattgattcatagacttttgactttgaataggataatttggttgaggtcgttgttgaaattgtgtattaggttcattataattacgacgattatcaaaatattgttgttgttgttgttgttgttggtaatgtggttgaacttgtggaggtggattttgaacttgttgatgacgatgaggtgactgtgtctgagtttgatactgattttgcatttgcatttgtacattattattattcatattgttcatattggtattattattattattatagttttgactaatattttgaccataactttgactattattattacttacatctctttgatcagtagtacttctaacttgataaggatgttgaactcttatatcattattttccttaattggagatttaagtcgaggtgggggtaatgaaggtatatcagctggtgataaagcagtttgtaaagcaggaaactgagaaaactgcgtacgcaatgattcatgtcctttattactatgttgatgttgctgtgacatcttcgttgatataataagtgaagattacaattctaattataagtataaataatccataacttaaagtattaaaatgatgaaacagacttaatggaaataagagaggcagtatcaggaatttaattgagcgacttaacgagtaaatgttactgattaatgtttaatattgtgggattgattgattatacaattacttcttttattaagacaatctacaatatacccacatgccagtatgtatcaccctccgtaacttgatcaattactatatataataaacaatgaatactaactatcaccatttttataggcttatcattcaacatttcttgctgaagaggatacaaatgcacgtattattggtaatatggcaattttaccattaaagacaacatttaaaggtccagcattaccttgtatggaatcatatgatataattgatgaaataattgatttatttagagcaaatacatttttcaaaaattttgaaataaagggtgcttcagatagaactttaatttatggaattttatttttatcacaatgtttaaattcaattaattataatacaaataagaatgaagcaattaaaattttaactaatttatcattagatgattttgcaattcctggtgatataggttttccattaaattcactttatttacctccaaataatagaaatgattcagttttccttagacaatatttatcacaatttagacaagaattatcatcgagattaattggtagactttatcaatctaataataatgtcccaagtaaattttggttagcattcggtagaaagaagtttatgaataaatctttataaacaggtatattatatagtgtttttttatattagtattacttattacaattactattttatattttgaaaacttgaatatcatgatgaaataattcactaaccatatcttccatatcatcacttttaaaatcccaacctaacattgcacttaatcctaatttttcaagacatggtaatctaccttcatcaactgcaactgttatatcatttggtgttaatttttcacacatacccatatatcctgtactttcaattataatacttttcaatggtctatcaaattcttctaaaaatactaaattttcatcatttaataattcccatgaaatatatccaatatcaatgaaaaaatattttaaatttggacaaagataaaatgatttatcagctcccttttcaccaattttaggcattggatattgaattgataatctattaagattaatcccaatattacttaatatataatttaaaccttcatctgttaaattgggacaatgagcaaattctaatgttgtaattgtttgaggtaatctaacattaattgcaaatgaatcagttataccaccttgtaatcttaaataccataatttttcaggccatttaaattcatattcatcacaaataagtgaacttcttgggaaacataattgttctaattttggtaaactttcaatacttttaaataattcaactaaattaacactttcagaaactaatcttaaatctaatattttcaattcattacaagctcttaaactaactaatggagcagcaccaaatgctgattgtgatgaaataaatatttctaatgaattacttgtccttcttaacaatttactcatataactatttttaccattttgaacaactgatgataaatctaaacattttaccattaattgaaattttctctttaatgctaatttagaattaacttttttcttatctttatttatgattaaatcatcatctatttctttaaccattgctgcatcatcaccactgatgacatctaaaaaagattctaaattttttgattttaattcaggatattcataaatatttttaaggaacatccaataaatggctcgacaaagtactaaatgatttgtacaataaggatttgaagttaatttaagtatttctattataatctccagtggtaaacgtaaaccagtagttttatcaatggaattatctttgtggggttttatattttttatattattatcatctatatgatcaactattatcatctcctttaatccataaatctccatttgaatcttcataaacatcctctgttacaccatagacgtattttttgtaaaatatcccccttgtcttcttcggacggcttttatttgccattatccctatgaaaagaaagaagaatataagaagcagttaattataatttttttttaaacttaaaaatcatcaacatttcccttttaagaaatttcaatatccggattacccaattaggtaatattaatataagaaattcttttaaatacattttaaaaatttctaatcttgaagttttccttgaacggaaagattgtaagatattagttaattgaattaaatttgattgagttgtttgatctctttgttttgaatgtttctctaaattttgaattttttcatttaatgtatgtttaagtgtgtaaattcaatatattttgttgtaacttatcattttctaatttatttatatgtttttccaaaacgagtaatttacgattctaatatatgatagtatgaagaaggatttaattgttcattagatgtaataattggaggtgaatcagtgatattttcatttgagatttcttctaatattatcatttaaattataaacccataatacgaaacaccaaagaataaaactaataccgaatttccaaatagttaataaccaagttaataaaaggataatcattataattgaccaaatatctaattgaggaccattatttgcaaagtttcttaaaattataaataattaaggcaaattttcaatttataataattaattgaaaaatttaatttattatactttatagtaaaataagataatgagatgattataatggatatgaatgggaatgttatgaatttataattaagagaatattgttgtattatagttaaaattacaccaattatgataatttgagggaatgataaatagggatgattagtgattgaagaaggaagtagaagattaatttacgagatgaatggggggaatgaggtgaagatacattagaagataaatttgaaggatgataggatgtctcttcatcactatcattatcattatcattatcatcattaacagtactataactacgtatagagttcattataataagagattgtttacattaagtaatagtaatagtaaataaataaattgagcccacagagattaatatagtttaatatcggtactccgagtaattacaattattaaaaaaaaagggcaactccgagaaatatcagagggtttggcatcacgtgcaacacacaagggcacaccacccttcccaaaagagcacacccttcccaaagaggaaacagacgcaccaaaaagaagataattccccatagtaatctcaccctcccaataatgaaaaaaaatttcaatgaggagaaaaaaagtgaaaaatttacttactgttagtattatttattatagtggatttcttactattatactagtattatattcaatttacctattaagggttattcatttgtattttcatttctatcttgatcattatttgatttttaaactctattatcatatcttctattttacttacatattttctttaactcaaaggtctatcttcatatatcacatccaaaatggttttagttcaagatttattacacccaagtgcaacctctgaagctcaaaaacataaattaaagactttagttcaaggtccaagatctttctttatggatgttaaatgtccaggttgtttacaaattacaactcttttctcacattctcaaactgctgtctcttgtgaaaattgtactgaaattttatgtactccaactggtggtaaatgtaaattatctgaaggttgtgctttcagaaagaaataaattaattaattacttagtcagttgttatgatgtctatcaatatatcaattatccacattaatatagagatttatgtataataatttatatatacacaaaaataaaaatcaccatttaaagagaaaaataatattttacttcaaattttgttcaatatattttttttttactaatttaattatcaataattcatttgtcttatattatataatgtataattgttaaacaaaattatgaaaaaaaaaaaagaaatgaaaagaaatgaaaaagtcattaaaccactattcattctttggtaatctattaacagcctttttaataatttcctttgatttaagtaaattaacaattctaatcctttcattatttaaatgtgcattatcacttgattgtcctgttggtacatgaattgcacaacatttaaataatttttctaaaaatctaattgatggtatactaccaccttctttaatgaaaattggtttaatcccccattcatcatttaaacattcctttaatgtttgaaatccaatattattaatatcacctaaccatggttcagcttcatcaattattttaatatcaatataatttttactttgaaatttattaaattctttattaataaaatttattatatcatttttaacattttcaatttcttgtcctggtataattctaatacttaattttgcttcagcaaattgtgaaattaatgtattattttcagtacctgacatatttattttatgtaatgttaaacttggtaaattccatttacgttttaattcatttatattggaattttcaatcctttcactaatttcttcaaaaattaatttctcccaatcattaatttcattaatatttctattatcataaatttcttcaaatcctggtattaatattttatcatctttaactaataaacttaataatttaactaattccatacttggttcaatgaatacacctccatcaactccactatgtctatcaggtttatcactccaaactttaatttcaaattcaattttacctcttaatccataatttaatgatggtatattatcatctaaccaataactattacttaataatatccaatcaatattattaaaatcttttaaaatatcaatcttattattaattataacattttgaaacccccaactaccactctcttcttcaccttcaattaaaaatgttatattactctctaattctcttcttgaatataattcagcaattgcaaatattgaaactaataatggtcctttattatcagttacacctcttgcatataaataaccatctttaggtgtcattttaaatggatttgtattccaatttttacttgatgcaggtataacatcataatgtccataccataaaatatttgttggtttagttccatcatcctttttcaatttatttgccttaaaagttgaataaacaattggattaccattatcaacgggtaataattcagttttataagcaccaaaatttttcaataataacattaaataatttgcacatttcctacattcattcatataaatatctggttgtttagaaactgatctaaatgaaattaattcttttaaaattttaaggaaattttcattattagttatataatcatgtaattgtgttttctctaatcctttaaagaatttttcttcattatcgatttcttcacttgaatcatcatcttcatcacatatatcattcattgattttaatgaccataatgataatgaattatctgaacctccactaactaaataagttttattattcatttggaaactatttaatgttaaacaaggagcattttttgtaacaataattaaatcatttatatctttattaattatatttgagataagtttctttgttataccaaattctgttccaataaataaccattcatttgaataattattaattttaggtgaaattgttaaagtataaatatcatttttatcattaatttggaaaattttcaataattggaaagttgttaaatcccaaattgctatattaccatttgaagaacctgaataaattgtcattgaaggtttatgaattgtaattgagaaaattgtatcaatttgatcattagacagtgaatttaataaaattaaattatttaaattattattataaccccaaatattaattttaccatcaccaccagctgaaaatattatattttcataattatctgaaatattattaccaatattaaaagttagagggtcatcaattttcataaaatcaattgcataaacataaccattatgagcatatgatatgatattatcattaggtatttgaattactctcgtatgagtgtcagtatctgcgtgtatgggtaatttatcattatttgaatcgaaaaatctatcaaatctatttgatggcattaatttataatgatcattaattgaagaatttgtattattaattaaatctaatttaacgaatgaaagagaagcattttgagaaccaataaagatagtctttaaatcagcaatccaagtaattgagaatatatcaccaatatctaataatgaataaattgtataagttggtaataattgtagtgtgtcagtattactactgttatcaattttttcaataaaatcattaattttccaaattttaacaagtgaatctgaaccagcactaaataaagtattttcacaatcagataaataaagacataaaactgaaccaacatgagtttgaatttttaatttaatttggaaagtttgtaaatcaattacaattatatttgaattttgtgtaccacaaaataataatttcctctttgatgaagttaccatacatagtacactattatttaaataccaattatgtaattgactattttggaaaatcaaatgaatgatctttaattatattatcattagtattaaattcatgatgatgttgataattattgaaggaagatgaaggagagggggaattaattgataataatgtcattagtaattgatattaaaagaaagtagtatccctatacctattctattttaaccttataattattaaatgttcagtatcagtagattattattccttcactattagcgaatgattactattataatagaaggttttcttcatgtagtaagtagtagctataatagagtcatttttaattttaaattttatttacgtaatataatataatataattattataaacaaacatcacgtgatcaccaatgattacataatcaattatcacgtgatgtattacgtaaactagtcacgtgacatattataacagacgcgtctataataattaaaaaaaattaaatctgtacaccataccaataataaatagaaaaaaaatctttgaaatttaattggtcttcacaactctcactataatatatcaaattcgaggattatactaacatgaatattagtatagtatagtatagtatagtatattctaaaatacctttctttaatcaagaacaaatgtccgctgttgctaaatctgctactactaagatcgattgggctagaatcattcctcaattaggtcttactggtcaaactgctacttctttatcttcttcaaaaagagaaatgatgaagcaaagaaagttttatttgatttaaaatctcaatcaacttcaattgaatttaataattattcatctttgaaagaatgataaaattgtttcaactattaaatctgatatttcatcttttaaaccttcaactattgatttatctaagcaattaaatattattaattcatttgaagttaaagcaattgaaaatgctaaagaaactgaatctttagtattaaaggaattaactgaattagagaaaactttagataatattgaatctgcaagaccatttgatcaattaactgttgatgatgttgttaaggctagacctgatgttgaagataaagttcaagatatggtttcaaagggtagattcgaagttcctggttataaggaaaaattcggtgatttagttatcatgtagagtctgttctcctattactaccatataatattactctaaaattatttatttataatctataatccatatttatttatcccatatttataaccttttttcttaaagaacttatatttatttcatgaaattttcatcatcctctataaatttcttttcttttatccctttaactatactatgtcaaaagatttatcaatatcactcttaaatgcattagagaatgaaaaattaattgattatgaatcaactcatcaattattaacttcatcatcaccaaaattacttgctcgtaatggtcaagctgttttaaatttatcaattaataatattaggaaaagttttacaggtaaatcaattatcgaacttgttattcatagtgctgttaagaataataatggtaatccttttacagattttaaaactggtgatattgttaaattacaggaaatgaataaatctgaaaaaggtaatgataataataaagataatgatattttcaatattgatggtgttgtttcaaaatcatcaaatgaaaagattaatattgtcatatcaaaagattgtgatgaaatttggtcgaataattcaaaattttggattgttaaaatatctaatgaatcaacttataaacgaatggaatcaacattaagaaaattaaatgaatttaaaccaaattcaataactgatattttaacaggtgaaagaaagtacattccaaagtcaaaaacatcaattgattcttggaataatgaatttcttaatgattcacagaaagatgcaattgaatttgcaattggtaatgaaatttgtattattcatggtccacctggtacaggtaaaacttcaacattaattgaattaattttacaattaaaaaatagaattaatggtagaatattaataactgctgcttcaaatattgcagctgatacaatattggaaaaattatcaaatatgaaaaaaagtcaaaaaagaaacgttcctctaatgaattaattagaattggtcatcctgtacgtattatgaatcatttacgtaattattcattagattatataattaatgaaaataagggtaaagaatttaaagatttagaaaatgaaattatcaaactggagaaagaggtacgtaaaccaagaattagtaaagaatggtcaaataggaaatcaatttggaatgaaattaaattacttaataaagaattaaaattaagaaattcaagaattgttaatgatacaattaagaatgcaaaaattataatttcaacattacatggatcaggttcatgggaattagttttaaataattatggtaatggaattgaaaatttccaaaattttattgatattttaataattgatgaagtttcacaagcaatggaaccttcttgttggataccaattataaatcattcacctaaaaaattaattattgcaggtgatcataaacaattaccaccaactttacatatgaatgaaaataataaattttttaaaatactttcaatgtcattatttgatagattaaataaattatatgaaaataatttaccatttaaaaaattcttaaatgttcaatatagaatgtgtgaaaagataatgaaattcccaagttataaatggtataataatgaattaattgcacattcaagtgttgcaaatggtaaattaattgatttaattcaatctcctgaaaattttgatgatgatttaattgaacaaattatttggtatgatacacagggtatgtatgatgaaattgaggatgaaaatggttcaaaatataatattggtgaatgttatataattcaaaaacatattaaaaaacttattaaattaggtatttcaatcaatgatattggagttattgcaccatataatgcccaagttgcaagattaagagaattattatggaatggtataattgaagaggatggtataattgatgaaaaatttaatgttgaaattagtacagttgatggatttcaaggtcgtgaaaaggaaattatattattatcattagttcgtacaagtaatgaaaattttggtaatagtgaaattggatttgttagtgatgaaagaagattaaatgtttcaattacaagaagtaaaaaacaattatttattgttggtgatttaaatacttttgaaaaaagtggattaaatgaatggtgtgattggatttatgaaaatgctgaaattagatatgatgttgaataaattttaaaatagattaataatcaattattgaatatgttatatcattatctgctgttattattgatgattgtattggattagttgatattatacgtgatgataataattgatgaaattttggttcaatttctttagaaattgttgaagatattgaaattgttgaaatatcccatgatattataccattatctgaaaggaaaacgatatcttcattaggtgaaacatcaattgaacttgatctaaataaatcatctgaaattatttctatatttgattggaaatttaatgtgtgaattgtaccattgaaagtatttaatattagctttgtgtatttcccattaattataagtaatccattggataaccatttaagactttccactatttcattttgatgtaaattagggattgagaattctgatataattgatttagggaatgtttctaatggtaaaattgatatagtttttgtaaaattattgtataatgcaagtaatgtacctgatgtatctaattcaattacaggtattgaacaattagttgataatgaattaagtggattacctattctactatcccaagatttaacagttccatcaattgatgatgaatagaaaagatccataccaaataatgaattatttgaaggtaataatgaaattatttgacctttatgaccattaaaatatctttgaaatgaatcagttgaaatatctaataatcttaaagcatgtgatgaaattgataaatcattattaattgaacatgatgaaacaatacatgaagttggtaatgttgatttagaacttgataatgattgtcttaatgtgaaaattgcatttgatgcaccatatttctttgacattatagttttaactattttacctcttgaattatctaataataaaactctatcaggagctgatgctaatgaatataacccattatgagaagtatgtattgatgataatggtaatgatgtctcaataggtatggttctctgtggtgttatttgcattgtaaaagaaagtatacatactgttagtgaaaaatcgtatttaaattcatgtaacacgcttttaccctgatgcctttcttaggagatacaaacaacaatgggtgtattctcagcaggtaacttaacacatttagcagtagaggcagtacttgttgcagttgtaattgcaggagttcatgaagctacaggatgtactatggcaccagataaagcagttacaggtgaaaagggtcaatggtgggttaaagaatggttaatgatgggtgaatggatcttcaaagaggcatgttcaaaagctgaatccagtgctaagaaaggtggtttatttcgtagagatcgtattgtataatgtagtttagtttaggatagtatatataacaagggggggatagtttataaataataataaggaaataataataaggaaataataataacacatgattattcttcaacaagagcattagcatcatctaataattcagccaattcacctgaatgactcatattagttataatatcacaaccaccaacgaattcaccattaacatataattgaggaattgttggccattcagaatattctttaacaccttgacgcaattctggatcttctaaaacattataagcagcaaattttgatggatcaacaccttgttgacctaataattgaatagttgctcttgagaatccacatgcaggtgcatctggtgtacctttcatgaaaagaacaacaggtgcagatttaactgcttcatcaattgctgcacgagtttctgcacttatgaaacgaatagcattaaaacgagtatttatagtattggttcttaaacttgaacgaataatattagatcttaatgaactgaacatatttattgtctgttgagtgcctgtctttctataacacagagcttagtaatgtctaatggatgaatggaaagagaaagaaagagaggaaagaataacctcccccaccaatcgacccatcggcttgcccagtaacggctgaaaaatttccccagtgaaaaatcctcattttcttctattatattaattatgccttatctattattctaccttcttaatccactattttctattgcaattgctctatttacaacgatgctggacatcaatgatgattttgatgtctctcagttcttgatattggattctgaatcagatactaatgatacaattagtcttaataataataatgatatcattgatgatcaattattaaatgaaattgataatttgttcaatccaacagttaagaaacaaaatcacccggtaaagccgaatactccaactaataccaattcaacaatgagaaagaaacatagatcttcaactataactattcctccaacacaacctaataagtcaatggcacagagagcagcagctgttgcatccgctaattcacttaataaaccattccctaaaaaacattatgaaaatgcaagagcagctgctaaggcagtctctagaaattcaccaatatcatcaactacaccatcactaaaatcttcttcatcattttcacatcatcatagttcaccacatgcaataatatcatcaccaatcactccaactactaatcgtaaaaaaattgaaaaacgtcaaagtgtaccaaatatttcatcatctaatacatcaatatattccaagacatcgaaaaattctaaatcctccaaatcatcgaaaaactccaagaattctaaaaattcaacattttcatattatcatgcatcaaattctataagttcatttagttcatctgagacattagaatcaattataacgaatttccaatcaaatgatacaattaaaattgtaccatttacatacccaacatgataccccaaataagaaaaatagtaataataactaatagtaaagttgaatcaccaacaacaccaggtaacggcaacaacccatcgttttggaatgttatcaactaattcaccgagtacaagtaatacccctcgttcatattctatagatacccattaccaaaggaattcaatacaagctgtacctcaaatatctgtttggaaaatacctccatcatctccaaataataatagtattattaacgataataataataccaataccaatatcaataccaatacgaatattaacaacgaaattacacatacacgtcaatcatccattgactattccccaagaacatcacgtacatctactatatccactcattccatatcatccaatagtaataccaataccaactccaactccaatgacgcgacggctcagcccacatacataccaacaactccaacgacaccaacaaatgacaggtacttctcatacaactactacaaatacaaacaatacagtcttattcaagaatctgataactacattcaacaagaaggaacgatccccgaaacctgcccgtgccaaagtgtacaacaacatggtgcaaggcctggtggagttccaggtgaaggtaagacgaaaagatgagcttttcttaaagtaacgcgaattttgtaatttttttaatttagttttgtatctcttgaaattgggtataagtctctaattatataagccttgtttggtttgaatggtagataaacaccatggttgtagataatattgagagtagtaatgatccagagggtaacattaataatattaatgatactaataatattaataaaactatgattaaggaagaagataaggaaaagggaactattgatacacaatcagtacccagtcaaggttcagattttgttaagaaattattcacaatgttggaagagaatagatttgataatattgttaattggtcagataatggtgattcatttttaattatggatacaaatgaatttacaaagcaagttttaccatgttattttaaacatagtaatttttcaagttttgtacgacagttaaataaatatggtttccataaagttaaaatatctaatgaagcaaaacagaaatatcaattagagaatgtttgggaatttaaacatcctgattttaatagatttgataaatcttcaattgaaaatattaagaggaaaatacccgtaaagaaagattcaaatgataataattcaaataataataattgtaatcatcttaattcaattagaagattagaggataggaattaattatttagagaaggaaaattcaaatttaacaaataatataactaatttaaaatcagattcaatgaaattaaatcaaaaatataatactttagttgttaatttactaacttcaaaagatattaatatgtcattatcaagatcagtggaatgtttatataattcaattttacaattaggtggtagagttagttctgaaattgagtttcctcatttagatttgatggatagtaataaattagttaataatcaaaatacgaatatcaatactaatccaaatagtaatcctaccaatcctgctattaataatgataataatattaacaataacaacaacaataataataatcatattcataataataatacccactctagtatcaatggaaataatcataatcaatcaattcctaataccaataaaagtatatccgtaagtccaataaataaccaaattgaaagtcatcatagtaaccaaaatattaatgataataataatattaacaatgatccaaatacccatttacatattaaatcagaaccatttgattcaaatgatattaaattaacatcaccaaataatgcattatcagaacaggaaagaattagaaatcgtccaaaaggttcaattattcatattttattagttgaagatgatgatatttgtattcaactttgtaggaaatttcttattaaatatggatgtacagttgttgttgttaatgatggattaagtgcaatttcagcagttgaacaagttaaatttgattttattttaatggatatagttatgccaaatctggatggtgcaactgcaacttcagttataagatcatttgatagagatacaccaattattgcaatgacaggttcttatcataggaaagatttagctcattattcaagtcatggaatgactgatattttaggtaaaccatttacaaaggatgatctttatatgatattgaaaaagcataatataaatccagttattattgatcctccatcagcggaaccaatgcaaggacatgtacaaggacatggacatggcaatggtcatggaaatggacaagtacaagttcaagtacaagctcaaggtcatccacaagttttacctccacaacaagtgcaacaagtgcaacaaggcaacagcaaataacaatactactactacgaataataataatataccatataatacaattacacgtaaacgtgcgtcaaatcctaatgatattaattcattaaatactataccaattataaatacaaataatgaaacacttttaacaccatcaattttacaaccaactggtatgacacctgatgttagtgttttcacaaatccaacaaatattgatggattagttgtaccatcagaagttgacgttcaagaggcattagctacagttgatatggatttactcaatgtacctgattctgaatacggttcaatgttcaaaagacaacgaaatatgtaatatttaatgtgtaatgatctactataaccatataactaccaggtatcggagatattaaagtgtgggatattacgtaatagaggataatttaattttgaatttttcaagagtcaaagttacaggttagtcattggatgattcattttaatatatagtggagactgatacttttatagaacaaggatgtttgcattattatcatcacgtcaaatagttagatcttcatatagattcaaacatacattggcatttctagaaaccaatggtacaaatttaacccctgcatcattaagtacacttaatgcagcaaatttaattaaaaagccaataattgcattattagttggaccaaatgcaactgatgcagcttcaaatgtttctaaaattgaatggtattagtaaaacattagttcaaaatgatgaaaggtatgaacattatttacctgaacaagttacaccattaattacaaatattttaaaagattcaaaatttgaaatttcatcatttattttacctgcaagtgcagttggtaaaaatattttaccaagagttgcagcaattatggatattcaaccattaagtgaaattactaaagttattgattctaatacatttgttagatcaacatatgcaggtaatgcaattttaacagttaaatcaaatgaaccaattgttatgacatcagtacgttcatcatcattcccaagtaatgttaatttaaatgaatcatcaaataatggtgaaattattaatcttgaatatattgaaaatgattgtaaaactaaatggattagtgaaaatttaactaaatctgataaacctgatttatcaacaagtaaaattgttattagtggaggtcgtgcattaaaggataaggaaacatttgaaaaattattaaatccattagcagataaattgcatgcagcaattggtgcatcaagagttgcagttgatgaaggattttgtgataattcattacaagttggacaaactggtaaaattattgcacctgaaatttattttgcaattggtattagtggtgcaattcaacatttagctggtatgaaagatagtaaaataattgttgcaattaataaggatgaagaggcaccaattttcaaaaatgctgatattggtttagttggtgatatatttgaaattgtacctgaacttactgaaaagatttaaagtagtatagtatagtataaatttagaatcaatcactatataaataacaactatccccgtttatgaatttattttgattttactttaactaccacttgtttctttcttctcttattctaatacaacaactctctttgcgtagtttaatagtattagtaatataattaaagatgtatacaccttcaagtaattcaaaaccttggtcaattgataatgaaatggaacaacaacaatgggttgcaagtaaatatgaacaaaaacccgcattagctgcattaactggtatgattgcatcagttccaattcctaaaatatttgcatcaaatgctgttccatttatgatgtggagagaacaaggtcaagaagctaaagttgaaagtagaaaaatctaataataaataattaaaagtatttcatttacatgtatgtattcttgtatttttcctatataatttaataaaaataatcattacacttaatagatgatgatagataatagtagataatagtagataatatatgataatagaactttaatggatataaatataatgatataaagacaaattgtaaataaataaataagaaatgataataatctaatctaattatttatggtacactaaataaagagaaatttctaacaatatttggaccatattcatcataatctctctttgtatgacaataacttctaaattcagaagtttgagccattaatgaaccaccaaaccaaactgcatttctttgtcttttatgtgatataacttgaacttgaacaccacttgatttactaccacttaatctttcacttgcttcaactctttcattaacaattgttttcaaatctctttgtaatcttctaccaaaatctttaaacattgttgaacctccacttaagacaatatttttatataaatttttacgtacatcaattggacttgcttgaataacttgatcaacaattattggtaatggtgtaaggaaatctgatgatgcaatttcaggattaaagaaaatttcaggagctaaaaatctttcataaccaatatcaatttcaacttttctatgagatacagtttcaacaatatattttgcaaacatttcactatcattatcaaattttctaaattctttaacaatatcaggacaaacataacaaaatttttgctttatctcttcagcagttttcaaacttgaatctaattcccccctctctcttaataaagtttgaataaaacttgtaatatctctacctgcaattggtatatttttaattgcactaccaataacataaccttcagcaacaggtataacatgagtaacaccatcaccactatcaataacagtaccagttaaacttctatcaattactttagaacttgtccaagaggcagctaatgctaaaactgcttgaactgcaatatagagacctgcacaattaaaactttcaaacataatttcagcagtattttctctattttcaggtggatttaatggaggttcagttaaaaggaaataatgatcttcaggttgacatttaagatatttaaaaattgaattttcccaaaatctttccatttgatcccaattttcaatttgaccatgtttaattgggtaattaagtgaatatgaaggaccttttgatgcatcaattgctaaatcaccaatataaaaatctaaatctgacatttctctattaccatgaattgaattatttgaaattttatttctatttaagaatgaagtatctgaagatgtataaggggaattaattgatgataaatctgatgatttattaagtattgaagaagtattagtagtactacttgaattactatttctagttgcaattgcagttgggaaaacccaagaaggagaatcattacctgcaaaacctaatttagtaaacccagtcccattgtccatgacaacggccggtgtgttaattgaagacattgtgattgtatctgtgttaataccttattgattcttctaatataatattatatattgccacccctaagtgtctctttctatagtaaattcatgtcggtatcttaaagaattaaaaaacaaactctaaagacgcatcgacccaacgattacgtaaccaaaggaatcggaggagacttccccataaatactataagggatctctatttctatttctatttctatttctatttgacatgtcctttattataatttcatttctgatttgtatgtgtttctttctggatcttttcagtttgagtcttttatcttctttatcttctctatcttcttttaacaaactaaaacaatgtctcaattagaacaattaaagaaaacaggtaccgttgttgtcgctgatactggtgatttcgaatctattgctaaattcactcctcaagatgcaactactaatccttcattaattcttgctgcaacaaagcaacctcaatatgctaaattaattgatgttgcaattgattatgcaaaatcaaaatcaaatgatgctaatgaacaagcttcaattgctcttgatagattattagttgaatttggtactgaaattttgaaaattgttccaggtagagtctcaactgaagttgatgctagattatctttcgataaagaagcaactattaagaaagctttggaaatcattgaaatgtataaagatcaaggtatctctaaggaaagagttttaattaaaattgcttcaacttgggaaggtattcaagctgcaagagaattagaaagtaaacatggtattcactgtaatttaactcttttattctcatttgttcaagcggttgcttgtgctgaagctaatatcactcttatctcaccattcgttggtagaattttagattggtataaggctaaaacaggtgaagaatatactcaagaaactgatcctggtgttttatctgttagaaacatctacaattattataaaaaatatgattataagacaattgttatgggtgcatcattcagaaatactggtgaaattgcagctttagcaggttgtgattatcttactatatcaccaggtttattagaaaaattatctaacagtaatgatgaattaccaaagatcttagacattgaaaaggctaaatctttagatttagaaaaagtttcatatgtcgatgatgaagctaaattcagattcttattaaatgatgatgcaatggcaactgaaaaattagctgaaggtatcagaaaattctctatcgattgtgttgctctttatgatgaattattaaagagaatccaagcttaaatgtgttttatttctgtcttatatcatatcttatcctctcttatttatttatactttctatttatttatataatgatgcatgtttaatgttcaataatattattgctagtaatttaacagcaagagactacttactgagtaaatttctcaccgggtgagaaacgccatgttgattttataaatacccatcaattaatatcatccaatactacccccatttctttcttttaatttcaatcaaacaattcattaattgttgacattgataccatcatcaatcactacaatgtctcaattacaacaatcaaataatataggtttacctacgggtacatctattgaaatgcaaaattatacacttgatcaaatattccttgaattaaaatcaattgatgaaattcgtcgtttaaaagctgcaaataatttaagaacaacttttatattaatttcaagagatttaaatacaactgaacaaattacaatttataataattatattaataaaaaaatattcgatttgattaattcatcaaaaattaatgaacaattaggaggtattgaagcaattaattcattaattgaattattatattcttcttcaactgatgatactcattttagtcaattaacaaatcctacatctaatcgtattaatccactacctggtttaaataataataataataatgatgaaaattcaaatatgattacaagatatgctaattatttaagaaaattaacatcttcaaataatttaatagttatgaaagctgcaacaaagacaattggtaaacttgcaattccaggagctttaatgacttttgattttgttgaaattgaagttaaaagagccttggattggttaattaatgaaaaaattgaatctaagaaacatgctgcaattctaacaatttcttcacttgcacaaaattctcctgctttattatatcaatatattaaacaaattttccaaaatatttggattggtttaagagatccaaaagtttcaattagagaagattcagctatttgtttacatcattgtttaaatattgtctatgaaagggataatattttacgtaattattggtttactaaattatatggtgaagcttttagtatctttaaagctgcaggtttcagctctattcaaaatcctgataaacaaaataatatcaccagtttaaataataatagtgcgtctactaatacatctaataattcagattattcagatactgctaatcaattaataaacactccagctgaatatattcatggctcacttttatgttatagagaacttgtcgatcaaggtacatctattttaggaactaaaattgatgaaatttatgaaactataatgagagttaaagataataaatcttttgatgtacgtaaggaaatttgttccattgtacctaaattagcaagatatgataaaattaaatttgttgatagatatatgcatcgtgttttgctttattatatatcacaattaaaagttggtaaggataaaaatataattttaatgagtattggtgatatttcaatggaagcaaaaaataatattataaattatttaaatggtatcgtatttgatactattagagatagtatctcacaatcatctgtacgcacacagagagaattatcaccagctggttgttattgtttatctaaattggcaatctcattaggagccccattaactaaattcattaatgcttatcaaatactcaaatatttacttaaattcccaattaatgataatataatgagtgttttgaaaatctttacaatccatttaccttcattagaacctttaattaatgataaattgataaataccgttagctttaccttatctggttatcaattctcacatcctggatctcctgaatttgaaaaattatttgatgaagatttagcttataactatagatataatatgttattaaaggaaggtgatatgtttaatcaaaatactgttaaggaattaactgaattatcaaatataccaaaatcaacatttttctcagatcccgatgtcgttgtcattttacaagctttaaaagttttaagatgttttgaatttaaaaattatgatttaaatgaatttgttcaatatgcaataataaattatatatctcatcaaaattatgaaattagattacaagcttcagttacatgtgcagaaatttttagaagaggtacaatctgctttgaaagaagtgaacattcattgaaaagtgttgattttgtcttatcgaaattattaacaacttgtattactgatccagttaatgaaatcagacttgaaattattaaattattagatgatgtttttgatgcacatctttcccaggcggaaaatgtgaagttattattcatgacattaaatgatgaaaattttgaaattaggaaggaaacttataaattagttggtcgtttaacattctttaatccagcatttattgttccttctttgagaagaattctaattcaattaattactaatttagaatatggtgctcatacaactagaattagagaagaatcatgtattttattaggtattctaatttcatcaactggtgatttaactaaaccttacacaaagcaaataatggatgcattgctacctcaagcattagattcttcatcaattgtatcagcttctgcaattgttactattggttcattatctgaagtgagtggagatctcattatgccattcatacctcaaattatgcctatattaattgatgcatttgaagatcaaaaatcattattgaaaagaaatgtttctattacaactttaggacaaatttcaggttctgctggttatgttattcaaccattattggattatccacaacttttaggattattagttaatatactgaaatctcaaacttcaaataatgttagaagagatactgttagattattaggtattttaggtgcattagatccttataaacatagagaagttgaaagaaagggtcatgatgcagatactgttgctagacaaaatgctccacctattgatatggaattattaatgaagggtaaatcaccaactaatgatgattattttcctactgttgttattcaaacattgattaaaatattaaaggataattcattgaccatgcatcatcttttagttactcaagcaatcatgaatattttccaagatttaggattaaaatgtgttccattcttagatcaagtaattccagctttttcaattgttatgcataattcaccattatctatgcttaatacttatttccaacaaatttgtgacttaatagacattgtcaaattaaatattcgtccttaccttccccaattattcgaattaattcaagaatttttcccaaatgttaaattacaatctaaaattattggtgttatagagaaaatatcaattgcattagaggatgaatttaaattttatatgttaaaattgattaatattttcttgggtattctagagaaagatttatctgttagttatatgtcaacgttacgtgttttgaaagcatttgtcatttttggatctaatttagaaccttatatttatatgattataccttcattaatcaaactatttgaatactctccaatgaatgttaaaaaagcatcaattgattgtattggtaaattatctaaaaatgttacattaaatgattatgcaagtgaaattattcagccattattaagattattaagttcatgtgataatacaagtttaagaacttcagcaatgacaacaatttgctcgttattattacaaatgggatctgatttttcagtattcataccagttgttacatctgttttaattaaaagtaaattacaattcccattatacgatcaatttgttgaaagattgaataagggtaggcaattaccatcgaatctggttctttaccctgatcaagatgatgaatctaaaaataactcaaataatttaaataataatgatcaacaacaatctaaaccattaactgttaatgcacaaactttaaaagcatcttgggactgtagtactaaaagaactaaggaagattggcaagaatggataagaaagtttagtattcaattattaaaggaatcaccatcatattcattacgtgcatgtgaagttttagcatctgtttatccacaattagctagagatttatttaattgtgcatttgcaagttgttggaatgaattaaatactcaatttcaaggtgaattagctcaatcattatgttttgctttatcatcagttaatagttcaccagaaattcatcaatcattattaaatttaacagaatttttagaacatgatgaaaaatctttaccgatcagaattcaaactctaggtcaatatgcacaaagaagtcacgcatatgctaaagcattacattataaagaattagaatttattcaagaaccttcaattcccacaattgagtcattaatcagtattaataatcaattacaacaatctgatgctgcaattggtattttaagatatgcacaggaacatcatggattacaattaaaggaaacatggtatgaaaaattacaaagatgggatgatgcattacatgcatataatgaaagagagaaggaggaaccaaattcaactgaaattataatgggtaaaatgcgttgtttacatgcacttggtgaatgggattcattaagtgttttagcaaaagataaatggagtagtagtacacctgaaattcaaagatcaattgcaccattagcagctgcagctgcttgggggttacgtcaatgggagagaatggatacttatatctcagttatgaagaaagattcacctgataaggcattcttcaatgccattttatcattacataataataattataatgaagcatcattacaaattaataaggcaagagatttactagcaactgaaatcactgcattagttagtgaatcatataatcgtgcatatggtgttgttgttagggttcaaatgttaagtgaattagaggaaattattaaatataaatgtttaccaccatcaagtgagaaaagagttcatataattgatacatggaataaaagattattaggatgtcaaaagaatgttgatatttggcaaagaatgttaaaagctagagcattagttgttaagccaaagcaagatatggaaatttggatcaaatttgctaatttatgtcgtaagagtggtagattaagattagctgaaaaatcattaaatcaattattagatgaaggatcaactggtaaaccaggtaataaagcatcaccacatgttgtttatgcacaattaaaatatatgtggtcaagaggtcaaaaggcagaggcattaaatcatttggttgattttacatcgaaactttcacatgatttaggattaaatgaaaatgaagcaatcactcaaccattacctaaaactgtacctggaattaatgatgatatcgaaaaatttacaaagttattagcaagatgttatttaaagcaaggtgaatggaaaattgaaatggatgatgagtggattattaaagaatcttcaagtattttagggtcatttttattagcaacacattttgattcaaaatggtataaagcatggcataattgggcattagcaaattttgaagttatttcaccaaaatctaaaagtaatttcttaaataatgtcaatggtaatggtaatgtaaatcctattaataatgaaattaatatgaatacaattttaagatatgttgttccagcagttaagggttttttccattcaattgaactttcatcttctaatccattacaagatacattaagattattaacattatggcttaattatggtggtattactgaagtttgtaatgcattacaagaaggtattagaatgattaaaatagatacatggttggatgttataccacaattaatttcacatattcatcaacctgatccaattgttagtcattcattattaggattattatctgatttaggtagggcacatccacaagcattaatttatccattaactgttgcaattaagagtgagagtgtttcaagacaaaaggcagcattaatgataattgataaaatgagagcacattcatcagttttagttgatcaagcagatatggttagtagtgaattaattagagttagtgtattatggcatgaaatgtggtatgaagcattagaggatgcatcaagggcatattttaatgatcatgatgttgataagatgttttcaattttagatccattaaattccttaattatgaaaggaccaacaactatacgtgaaacatcatttgttaatgcatttggtaaagatttaaatgatgcacacagttggttacatcaatttaaacgtacaaaggatacatcatatattaatcaagcatgggatttatattatacagttttccgtaagattagtaaacaattaccaattttacaaaatttagatttacagcatgtttcacctgaattattaaatgcacatgatttagaattagcaatacctggtacatatgaagttaataaggaaattattaaaattcaaaaatttgacccaattttcattgttattacatcaaagcaaagaccacgtaaatttcatattttaggtagtaatggtaaaaattatactttccttttgaaggcacatgaagatattagacaagatagtttagttatgcaattatttggattagttaatacattattaagtaatgatgcggaatgttttaaaagacatgttgatattcaaagatatgcggcaattccattatcaccatcatcgggattactaggatgggtaccaaattcagatacgttccatgtattaattaaagaatatagggatccaagaaagatttatttagatgttgaacatagagttatgttacaaatgtcaccagattatgataatttaacattacttgaaaaagttgaagttttcacttatgcactggatataactagaggtcaagatttatataaagtgttatggtttaagtctaaatcaagtgaatcatggttagatagacgtacaacatatacaagatcattagcagcaatgtcaatggttggatatattttaggattaggtgatagacatccaagtaatttaatgatggatagaataactggtaaagttattcatattgattttggtgattgttttgagagtgctattatgagagagaaatatcccgagaaggttccatttagattaactagaatgttgagttatgcaatggaagtaagtggaattgaaggatcatttagaattacaagtgagaatgttatgaaagttttaagagagaataaagattcattaatggctattttagaggcatttattcatgatccattaattaattgggggtttgatttcccaattgagagagttattgaacaagcaggattaccaattcaattacctgagaataattataatgaattattgaaaagtggacaaataactgaacaacaagcagccaatatggcaataaggtataaggcaagtgttaaagatgctagagctgaatgtgttttaaagagaatcaatgataaattaattggaaatgattttaagaggagtaagaatttagatgttgcaatacaagttgataaattgattcaacaagctacaagtgttgaaaatttatgtcaacattatattggatggtgttcattctggtagtgggtattttaattttataaatagtataatattgttttatagaggatattgtaaatttttaaagaataacaaccattttttaattactggatgttcataaggatttgataaatgtaaattaatatcaaaatatttagaattaagtattttatcaattttcaattcatttaaaataattttgcttttgatttgaattaatttgacccatactatacctccaaacagtttctgcgattaattcaccaattataccacctaattcggcaccaattgggtatccatcatcgaaacctttctgtaatcctgaatctttacctttagttatcccatcgaggtaacctttattattatgacgtatttttaaagcttttatatcattattaagagttttctcatcatcaatatcactatctgaattccatatatcatcagatttatcagatttgttagtaattatactatttgatgaagatttcctctttaattcatttaataaatgcatgtttacagggatttcttcagaagaaaaatttttacaacaatctgaaccttttatacaactcatttagggataggagttggtagctaaggtgttaagaagaggcagaaaagcagtgtaagatgagttattaatattaaaatgaagattcatgttttgtgagtttatgaaatgaaaattgcgagaaaagaatttgcgatagggcggtattgaatgggagaatttttactatatggtatataagtgttagatggttgtttataggatattatctagggacaaggatgtcacataatgatatagttacacaagttacccaggatggtaatggaggaatgtttatgcctgctggtggggatgaatattcagatgattataatattgaaattaaaatgaatatgagaggacatatgtttacaattacgagggatgatttaatggcattacctgaaagtattttattatgtttatttcctaatggtatattcattggaatggatgggcaagttattaataatttaacagaggatgatattgtttatgttaatttcccacctgaatgtttccaatatatttgtaatatatttgataaagctgttaaagatttacatttaattaatgaattagaatatcataatggaggtggagtaaataatactaattttgatattaatgatccaaatatacttaatgatagaccatcaattattgtacttagagaagatttagattattatgttataccaccaattgcaaagatgaatgttgaacaaatgagacatttaaaattaattattggagaaaaattattagaatttaataaaatctttcaaggtttaggttatgtttcaggtaaacaacttaaaccagctgaacaacatttaatggatatgttatgttcaagtggatttcaaaatgatgaaatttggggtcatagatcattagaacctggtaaaacagttattttttcattatcattagcaagattaaataataatcatcatagtaataatcaaaatcataatagtaatattaattctccaacggattcaccaaatttaaaacctgttacatcaagtacatcattagttgaagagagaggtcgtcataaggagaaagatagtaaagaaaaggaaaagagaaaatcaaggttaagtacattagcacaatcaatttcaagagctggtagtaaagtacgtagtagtagtagtaaaccaaataataataatactaaattattattattttggaggaaaccagcaaggaaatgttggtggagtaatactactgttgaagttgatattagtgaattagggttagttgatagtaatggtaatgcaattacaggtgttaaagtcaatataagacgtgtatggacattagaattgagtataattggtattcaataagtgtagtagagtatacaatgttataatttctcagccgactgaaaagagaggaaaatcgggttttagataatggagtttttatctttctttacaagctgttgtatatattatatgtcttttattaacttctcttctttaacacacttctctttatacaacatacaatgaccattgaattaactacagtaagtgcaattattggatggatttacgttattggatggggggttgcaaattatccaacaattttacataataggagatgtaaatccgttgaaggtatttcaatggattatctctttttcaatatgatgggatttgtattatatacaacatatacaagttgtatgatattcaatagtatcataagggaggaattttatttagagaatggtgaatggccattaattaaggtaaatgatttaattttcggtgttcataatttattaactaatggatatatgattattcaagcatattgtttaggatatagtaaaaaggatagtcaaaaggtttcaattggtgctaaagttatcataggttgtgttattagttatataattattggattaattattatttatcataatcaaggatggggcgttgttattggtgaatttaatttaatgaaattagttacatatatgggattaattaaaattggtatgtcagtttgtaagaatataccacaaattatttataattttgagagaaagagtaccaatggatggccagttttaatgatttggtttgattttttcggtgcatcaatgtcattaattcaattaattattgatgcattggtagttaatgatataatgaatatatttgataataaaccaaagttatttcttgcagttcaagtgataatagctgattcaatattctttttacagcattattatttatattatgatgaaggtgagggttattttatattagaataagtgatggtatgattttgaatttttcactttttataataacttctttcttttaagtaatgagtagattattttcaactacacgtagtattaagattgcatcttatacattaaataaaaattcaattaaaagtgataatggtatattacaaagtgttggtaatacaccattaattaaattaaataaattatcagaagaaattggtagaaatatttatggtaaagctgaatggatgaatccaggtggatcagttaaggatagagcagcattatttttcattgaaaaggcagaagagagagggttaattaaatcagggggtacaattgttgaaggtacagcagggaatacgggtattggattagcacatatttgtagatcaaaaggatataaatgtgttatttatatgccaaatactcaatcaccagcaaagatggaaacattaagattattaggagcagaggttcatcctgtaccagttgtaccatttgataatgaaaataattttaatcatttagctagaaaacatgcagaaaatatggaaaatgcatattggactaatcaatttgataatttagataataaagatgcacatattgcatcaacaggacctgaaatttataatcaattaagtggtaaagttgatggatttgtttgttcatcaggatcaggtggtacatggtcaggtattactgaatatttgaaaagtcaaaatgccaatacaaaatcttttattgttgaaccaccaggatcatgtctttattcatatgttaaaactaagggtaaaagtttagataaagaaggaggatcatttacagaaggtattggacaaggtagagttacaggtaatgttgcagccaatattaaattatgtgatgattcatttttaataccagatcaagaaactattataatgttatatagattaattgaagaagaaggtattttcgttggtggtacagcagcattaaatgttattggagcaattgaagcagcaaaattattaccagaaggtagtaatattgttacaatattagctgatagtgcacataaatatagtaataaaattttcagtaagaaatttttaatggataaaggattatttgaaggtattccagttgaattacgtgaaaaatatgctatcttagaataatgataagaaatcaaaaatcaaactccgatattttataattatttacgtaatgtcacgtgatatttgaaataattttaaaattgcaattgtcacgtgagcattacgtaatcagtcacgtgaccaagatattacataatcaatattacataatttataactaaaactataataaaataaaataaaaacgcgttattagtaaaatacaagaacgcgtttgttttataattataattataataagcgtataattaattttactatatcttgacaagcccccccttttttgatattacttctttcttttcattttattttatttgtattcttttttcatttctattccttttactactacctcttcttatcaccaaacaatgttattacctcctgctattatatcaccttcgaaaaaatctcaattgaaaactccacctcattcaactcaaagattatcaaattttacttctttaagtaatattaatattaatattaataataataataataataattcaccctatcaaactactaaaaagggacttttatcacctgaattctcatctcctaatatagatattaatcttaatattaataattctttaattgaacctttaaaagctcctcaatttattgatttaccaaataaacgtcaaaaaataagtaataataataataataataataataataataataataataataataataataataataataccccatcatcatcattcatactaccatctcctcaagatatgccaataatctcctttccaggaactaataaacctccatattcttatgcaactttaattggtatggctatacttagatcaaatgatagaagattaacattagctgaaatttatgattggatttcattaaattttaaatattataaaagaggtgaagttggttggcaaaattcaattagacataatttatcattaaataaaaattttgaaaaaactgaaaaatctaaagataaaaagggtcatttttggaaaattaaagatggttttgaatatatttattgtaatatcaaaaaatcaaagagaagtatagctaataaagtaataccaccaaataataattcatctgaaactgatgatgaaagtaatgatagtaatgatgataataatgattgtaatattacaaatcatagtatattaatacatgataatcaacagattaatttattacaaacacctaaaaacacagcagaaatatcaaataacaacaataataataataataataataataccaataccacacaaacactaatttattattatcacatcgtcattataattatatcaataaatcattatattcccattctcattctcgtaataattcactaggttcaatacctgaacttaatattcaatattcatcatataatgcatcaccaattaatattcatgatttaacaccacaaaataattcaatagattttacatcatcatttagttgtagggcaaattttgaattaagtccaattaaaaatattgataatggtccaatacttgaaccaatgacaccaaataataatattaataatataattttcactacaagtactaatacaaatacaaataaaaagcaacaacttcaaataccttcaattaaaaaaatttcaacaactaataataatacaccaaattcaaatcttttacttataccatcaagtccaaataataataaattacaaaaaactccaattaaaactaatcaaacaaatcaattgcaattaaataaaaaaatttgggcttcaccttcatatcttgatgatttttatacatcaccaattaattattcaaataaacgtaaattaaatattaaatcaaaattaatgtcaattaatgattcaatgatgttaattaattcaaatccaagtagttcaagttctacaaaatcattaaataataataataataataataataataataagcctaatgcaattaatggttattcaacaaatgaaattttcggtattgatgtttgtacaattcatgatgataatgagagttattaactaactatcacctttaaacttactcttttatttcaattttatgtattttatctatatacggttatcttcttcttctgcttattcttatcttttataatatacctaataatatttctcataaacacattgtggattttcattaaattctttcctacttattacaatattattaaaagtacttaaacttgaaataattgaaccaccaataaaacaattatttttacgttcagttgatgcaaatattttaaatccaatttcattatcaatttttctaatctctttaattaatctattaccaaaatttttaaaacatgtactaccaccactaagtataattgaattaaataatttaaatcttaattctgtatcattattaataattgatttataaattaattcttgtatactattatcttcatatccaaaacttattggattaaataataattcacatggtttttttaatgattcattagttatattaagttttttaccatcaggtaatgggaaagattgtgatccattttcaatattatccatcatattaacactacataacctttcttttaaattacgtataatttcaaattctgatgatgaattcattaaataaccattctttgtgacttcagttttcaatattttagtaatttctctaccagctaaattaattctctttaaactatttggtaatatataaccatcgaaaatgtttacaattgaacaaattccatcaccaatattaacacttacaccagttgttttacccattgcatataatgataataaattacttattgataaattaattgcacctatattaaaagtttcaaataatatttgacaaatagtttcacgttgtttatttgatgtaaatatttcatcattaattaatattgaatgttcatttaaattaatttcattatctttcattaaatcatgtttcaatactttatcccaaataatttccattgaattccaatcttcaatattaccattctctataggatataccagtttaagtaatcctctattaatttgtgcatcattaccaacaaaagtatcattttgcttaatagcagttgggtaaataattaattttattatattttggagttccaattatattactataaggaaactcttggtttttcatcaccagagaatccacatctaatattacctgatccattatctagtacaataggttgattatagaagttcatagtcttacctaaaagaaagaagtgttatataggataatataatataaatcgctctatatctagatagaatagtatctatcaccaaaatcaccaacaccaggtacaacatatttttgatcattaagacattcatcaaccatacctgtaataatcttaatctttggataattatccttgaaaaccttaataccttcaggacttgctaaaacattaaggaaaataattttatcctccttaacaccattctctaaaaggacattaactgccattgcagctgaaccaccagttgctaataatggatcaagtaataaaacatatctttcactaatatctgaaggtaatttaacataaaataattttggagttgcagtttcttcatctctttgaataagtattttacctaatctaacacttctacaacaatctcttaaaccttgttccattgattcacctgctctaataatggaaacaccacaaattttacccttaaatttactaccttcataatgtaacatttaatggagtttcaataatattggattcaattggtaattgatttaatccttcttcaactaaaagtctgaataattctatctgaataaaagacaaaatcttcacggggggtgttcttattacgaataattgtatagagacatttaagttgattagtctctcttagtttaataacattatcgtattctttatccatggttagtctacgtatactatacttatataaaagaaagaataaaagaatggctgcttaatactaatatagagaaagacccgctatttgattaaaaaacttcctctctcagagacgtcctctaagacgtccacttcagtaatggtaaatgatacatccatggcaatactacgacgtacactatggatcagtgactctacagtggatggatacgttccttcctctgttgaccatctcgtagaatacttgtgatctatcccttatctcttcatctctctcattctccccttcgtaattagttcaattcttcaattatatctgtaagatcatttaattgaaatatacctttgttaagattatcatatatgagagtaattagtcctggtttataatatgatggtaagtatgggaattgaaataagtttaataatctattaatccatattttatcaggattgaatctatatttcattatttcatttaactatccaaattggtgataatgcttgtcttaaaactggtggactattagtcaacttgactttgattattattaaataattcataacttaattcatccttcatacctccattaattaatatttcttcgaaaaatctccatgtaattgatacaactttatccttggcatttgcatctacaaaacattttaatgaattaattaataatccttttgaataaaatttttcaccttgaatttcttgaattttctccattgtcttattcaattttaattcacaacaaatagaaattatccattcataatcatctgaatcttcaatttcaaaaattggtaataattcacttaatatatctcgacttttattatctccaatattaattaatataccaacaccaattgtaaataagtgatttattattactatttaaatatgtcattgataaatcttcaatcattctatcaatattattacttatactaggagtagtggtattctcttctccttcttcattattattatatttaattaataatccacttgccttaaataaaattgcaatatatgtaccaattgatttatctaatgattcaattgatgaaataactgttaaatatttcccattgattaaatcaatacaaatattttcccaattttcaataccttcaaatggtttatcaaataattcattatttaatgatttattaatatattctttaactaattttaaacttggcatttgatataaatataatgaaataaattcttcataccatgattttgcattattttcaattgttttaatactacctgataatatattaataatttcaattatttcaatcaagataaaactattatcattttgagaaacaatattagtagataaatctctcatttcaactgcaagtttcttccatctaagaaatttcttagtatctttactaaattcaattacatcatatgatttaattaaattaatcaaatcttcaattaatttataaacatcataatcactatcctttaactcttcaaattgacatgatgttaattctttaattattaaaccaaatgaacctctcataattaatttatttatatattttgaccaaaatatttgactcttataaggtttatcaacttcatcatttgatattaattcataatattcttcagttgataatatttccaccctttcaatccaattttgtaataatataatagtttcatcttctttaccaaaatgaacagcattaattaaatttaatacattattaacttcttcataattaataatccatggatcatttaatgtattaccaatattcaacatcttatctctaattaatttttgtaaatgcattgataaattactcatcaatttccttaattgaaactctctctcctctttcatttccttaattttagagataacacctatttgcatatattcatcatcttcatcattacaattataatgtttatattgtttattctttaataaaaattcataatccttatacacatcatttaggaaagtggtatattcctcagatttgtccattggaggtaataaatcgaattcaaatagattattcttactatctttcttcccattaccattcttaaacaatacaccatgttgattgttattatcaattgctaatctagttttcccatcattaccattcaacaatgacttactttgatcatcaaattgtaaatgtctcactggcactccagtaggatcgtctatatcgtaaaactcctcttcactgtccataatacccttattctatgaagaaactacagtgtaaacaccttaattaagaaaaccttcattcactcaacatgaaattttcaagtgaaaaatatttttttttcattttggttactggttagatactttatttcttttgttttagtatagatatagagacaattaagtaggtaatggacggtatagaaggtatagacgtacacagtaccggggagattactaagtttttaagaaacaaggacactccagtgtctcttatctatgaatttgtcacttcaaaattattcacagattccaacatttatttaccaaataaggaaaattttgtacttgaattgatcattagtagaatatcattatctaataacctctctgcaacatttaaatatagtgcatatacttgggaacttttcaattttatatggacaaaatgtaataatgatcaatcgttatcaattatgagattgaaaactatttcaaaattaaaatttggtgaagttttctctaaattattgaatgatatcaatgaaaaaaaattatatgaagatattaaatatattgattctttatcattaagtattcaatatattatcaagtatagtaataataaattacatatatctgatgatcaaaatttatcgattattaaaaatttacttaattttgtcattataggtggtagcaattattcaaatgatttaaaagtaagaattttatcacttgtttatgatattttcatgattaataatagatatcccttgaagtatgatactaagcataaatctgaattttccttacattgtttaggtaatgttattatatccattcgtgaaatctctaataatagccaaatggttgttaaaaacttgcaaaaaatgattaaaatggtcttattcaatgataataatgatacaaacactatagataataattccaatatacttaaatacatggagaaattttgttcttcctctgataattcattattaaatgaattagatattgtttacttgttagaaattataataaataaaattgatataattgaattagagaaaattgttaaattattaacaaattcatttccacaatattcttcaatattattgaaaaaaataactgagatgaataaatcattatcatttgatttcctttcttcattagtttccaaagcattggaattatctaatgaagaatcttacaaattaattatttatgcaattaaaagaaattcagatgttgctattaaatatactgatgatataattaaattatgttcaattgagagtcctgaatattattcattaacattatcattatttaaagaattaatagattcttattcaaataacagagaaattgaaacgtttataaatttatggaataaaattgtcaatgaagatccatattccaattccaatattttcaaatcagatgaaataattgattatgtttcaaataaactaatcaaattatctaatttacaattaactaaattacttaattctcaatatgaattatttaaatcatttattgataattatccagtatttttaatttcattatgtaaaggtttattaaagggtaattcaggttcaattcaaaattcattaagtaaatcattaattattacattacatgaattaaagccaattcttatagatttattgaaaattaatggtaaattcacttggaaattgaaattctacatacttacattatttgatgttgaagaaattgaaaatgatattattaatgaaattgaaaataataaaattgttaaggaagattattttttttatacaatcttaagaattattgaacaaaaggatgatattgatgatgttaataaagaatttaaaaaatccttagtttcttattataggaaatcatcaagtttagaatttaaatttatcatatttacaagatggtttttagttattgaaaatatacttgatagagaaaatattggtaaaattgtgaaaaattgtattaattcaatatcagatgatcaattcatcactattttaaatcataaattaattcaaactcaacctaatataatgtatcaaataattgaaaatttaatttctaatgaactttctaaattgaaatttttccaatatatttcagtttatgcattgaataaatctcaaagagaagttgttttaaatttatgtttgaatcatctaagtgaatcatatactattacaattattaaaaacttacttcaattaccaacatttaaatctaagattgaatgtgaatttgattcacttttaaaattagctaattttgatgaactaaaatataatgaaattattaaaatcattttcaaaattcatttacaacaacctgtggaatcaattaagtatttgaataatatacaaaaagaattaaataataaatttaattcattaactgaaaaaaattgtggaaataagaaaccatatttaattattgcatcaatattaattaaagaaactaaaaataataagaaatttgatgaaaataaaagaagtgaattaatcaatacatgtacaagtaatatttataaattattattaacatcattaaataatgataagaaaatgaatgttcaagtgataaaaaatcttattgaatttttaagtgaaattggaattcaaaatgacagtcaaaatagtgattacacacaaatttctactataattagtaaaattggattattatattcatctgatgatgaagaaatgaaattattattattcaaatatatttgttcattatatgaattttatgaaccaaattatgtatttgcattatatgttgttttaaataatgataaattatatgaatttgttaataattatattattaatatttcacaaagagataattatcaatatacattaataagtttatgtgaatcaattaaaattgttgataatatggaagatttaaaacgttacattgaaataataactagtttaattaataatttaaacaaaccatcaaatgaaggtattaaaataattcatagattatttatctattcaatttccacaattttcactaaatttcaatcattaaattatcaatttaaagacattgcaccattattggaatgtttgaaaaatattacatcaagtaaaatttggttatttacacaatattcaatggaattagttattgcattaattagcaatttaagtgataatttgattaaaatatcaacaaatgatacaattattggaaatttcattaacatttgtcaaataatttcatcatttatattatatcaaagacatagattaactaatagacatcatattattaataatatatttatttccctaatgaaaaatgttttcaaattatcaaatgaattgaaaattgaaggatcacaatcatttgagagattagttggtaatttatgtgaacctaatacacaaaatatattgacaatatccaatggaggaagtactaaggattcagatataaataattcattattacagattaaatcaggattaagaaaatatttaccaattttaatctgtaattatattaagttctatttacaatatcaaattaatataattattaaaccatcattagataatgtaatttataaaatgattgatttattaacattgaatgaattaaatttcattaataaagtacttgatcaacagagtcgtgttgtgttcaagaatatctatgaagattacaagaagttttataaatggaaagatgaataaattgtgtagtattagtataatagacctttataatagaaacctgtatagagaacatgaaaaatttcaaaaagaaaatattttttccataatttttaataagtctttttttctttatattgtttgtgtaacatagacaataactatggctaagatagaggagatagatgaggcaacagttgatgcattggttgatcaatgggagaaaactcaaataaaagaaaaggaaaagaagaaagagaaagaaccaaatacttcaaataatggagatattgaattaccaccacaaatagcagaagtttcatctaaatcaactgaagaaataatggcagaattaaacaaattaccatttttcatgaacgatcttaatgaaggagaggatacagaggatagacctgagattgaagcattaaaatcattagcatatgaaggagaacctgatgaaattgcagaaaatttcaaaaatcaaggtaatgatcgttataagagtaagaattataaagatgcagttgaattttacactaaaggtattaatgtttgttgtaatgttaaacatatagaggcagcattatatttaaatagagctgcatgtaatttagaattgaaaaattatagaagatgtattaatgatgcaaaggaatgtttaattagacaacctaaaaatgttaaagcattatttagagctgctaaggcatattttgcaattgaacattatgatgaagcaaaggaagttttacaatttgcttattctatagatgataagaatattgcagttaattcattaattaaaacagttaatgctaagatagaatatataagggaaaaggaagagaagaagagattgaaagaggaggaaagaattagagttgaagaagatttagagaaagctatccaagttagaaatattgtttctatcaaatcatcatatggtacagattctataggagatgctaaattacatttagaggatgttcatgatattgagacacaattaattatgccaactattataatatatccaacggttgatgaatttgatgttgtaagtgaagtaagtgaattaacaacagcaaatgaattaatggaattagtaatgaatgatagaaatgaagattatttccatgatggtaaacatgataattttaagccaaagaaattagaggcatatatggagacagaggatggtggattagttaaaatacctaagaaagttacatttaattcattacttatgtctaaagatgtaagtataccattatttgataatattttaagagtttattttgtacctaaagtggattctgctgaatggattgctaattggaagagagaggatgctctagccaagagagaatagtctgttatacttctatatactactttataaacataacaatacttaatacttaatacttaatacttagctaatcactaagtaaaaaaattttcatgaaatttaattttaccttaagatatatagacattattctttatttaaagacactgcagacagacaacaatgacaactacagctgctgttggtggtaagagaaagagagtctcctctggtctctatgtttctcaaaaagtttatgtcaaatcaagaaatggtaatgctacaaagattgttagagaacattatttaagatcagatattccatgttgttcaagagtttgtgaaaattgtaatgaattctataaacctggtccaaatggtgaaattcccaatccaattctatctgaatctccacttgaattgaaatctttggatattggtaaacactatattttggttgatactaatattgttcttaatgctattgatatattggaaaatgataaagttttatatgatgttataattcctcaaactgttcttaatgaagttagaaatcaaagttatccaatctatttaagattaagaacattaactaaaaatgaagataaaagatttgttgttttctataatgaatttaatggtgaaacttatattccaaggaaacatggtgaaattataaatgattataatgatagattaattagagaaactgctaagtattataacaatcatttatctgaatataatattaaaacaatcttacttacatccgataaggctaacaaagaattagctcaaggggaaaatattttatctttcacacttaatgaatatattgatttattaccaaattcaattgaattaaaggatatgttaccatcaactgaaaatttcgataaatcaatcaatgaaattaaatattcagaatattattcctctgctagattaatgggtgggattaaaaatggtagtttataccagggtaatattacaatttcttcatataattttttggaaggtaatgttaatgtaaataatttaccaaaaccacttttaattttaggtagagaaaatttaaatagagcttttaatggtgatcaagttgttgttgaattattacctaaaaataaatggaagaaaccttcaagtcaaattattgatgaagaaacaattaataaaaatgaattaggtgataatgatgaagatgaagtattaatttctgataaagagagaagattattaactcaagaagcaattaaggaacaaggtaaggataatgatgatgaaaataaaatcatgccaactggtagagttgttggtataataaagagaagttggagattatatgttggacaattatcaccaaattcaattaataaagatactgatcttattagtaatgctccaagaaatgtatttgttattttaatggataaatcattaccaaagattagaattagaactagaagagcaaatgatttaattggtaaaagaattgttgttgcaattgatagttggaattctaattcaaaattcccatctggtcattttgttagaactttaggtgaaattgaggataaagatgcagaacaagaggcattattattagaacatgatgttgaatatagaccattttctaaaaatgttttatcatgtttaccaaaagaaggtcatgattggaaagtacctgaaaatttagataatggtgatattcaattgaaaaagagaagagatttaagagatagattaatttgttccattgatccacctggatgtgttgatattgatgatgcattacatgcaaggaaattaccaaatggtaattatgaagttggtgttcatattgctgatgttacacattttgttaaagcaggtactccattagatcaagaaggtgcatcaagaggtacatctgtttatttagttgataaaagaattgatatgttaccaatgttattaggtacagatttatgttcattaaaaccttatgttgatagatttgcattttcagttttatgggaaatggatgaagatgcaaatattattaatgttgaatattttaaatcaattattaaatcaagggaagcatttgcatatgaggaagcacaaattagaattgatgatgaaaaaaagcaagatgatttaactaaaggtatgagaattttattaaaattatcgaaaaaattgaaaagacaaagattagcaaatggtgcattaaatttagcatcacctgaagttaaagttcatacagatagtgaaacttctgatccaaatgaagttgaaattaaaaaattattagatacaaattcattagttgaagaatttatgttatgtgcaaatatttctgttgcaaggaaaatttatgattcattcccacaagttgcaatgttacgtcgacatggtgaaccacctgcaactaattttgaattattaaatgatatgttacgtttaaagaaaggattatcaatttcaacagagagtagtaaatcattagcagattcattagatagatgtattgattcaaatgatccatattttaataccttaattagaattatggcaacaagatgtatgttagcagcagaatattttgcatcaggtaattttagttatgcagaatttaaacattatggtttagcagttgatatttatacacattttacatcaccaattcgtagatattgtgatattgttgcacatagacaattagcggctgcaattgattatgaaccattacatgaaattcatatggataaatctaaaatggatttagttgttaaaaatattaataaacgacatagaaatgcacaatttgcaggtagagcaagtattgaatattatgttggacaagttatgaaaaataatcaaagtgatcaagaaggttatattataaaagttttctctaacggtattgttgtacttgtaccaaaatatggtgttgaaagtttaattaaattagaagtattaggtgatgttaattcttcttcttttgatgaaagtaattattcattaacatttgttgataagagtggtaataagagaactgtatctgtttttgataaagtcaatgtctctattgagtcagttctcgatgatttcactggtaaaaggaaagtccaattgtatcttaaatagaatagtactatatagtgtattacgtaataaaaaaatgaaaaatatttttttcatcttgatgaatttccattaattggaagagttaagtatatataggagaaagtctttttgatttcttttgtagggtaatgtcgaatctaggattacaagttagacaagctgcagggtctattgataccgttgttgccgattatgctgttggttatatgcaacatgtattgaaatctactgaagatgcagttttagcacaacaattagatattattaaagaagtttcatttattgaagatttattaattagtgcaggtggtgatgaaactaaagttaaacaattaagttctaaattaagagaaaatatggaaaaacaattaaaggataatatggctaaattagaaattactggtgatacatcaaagagattattagatattggattacttaatagtaaacaaagagaaatggattcatcattagcattattacaatcaactgatattgaacatacaggtagaagtattgaaagtagagttgataagaagaaattacaaaaggctgaagctaaaattgctaaaaaagttgcaaagagaaataatcaatttgttaaatatgaggcatccaaattacttaatgatgcacaaaaggatgattatgattcatttttccttaaagttaatccaattgaatttggtgcaggtgcaggtaaaagtaaagatattaagattgatacatttgatttatatgttggtgaaggtcaaagaattttaagtgatgcatcattaacattatcatatggtaaaagatatggtttagttggtcaaaatggtattggtaaatctacattattaagagcattatcaagaagagagttagatattcctaaacatattacaattttacatgttgaacaagaacttagaggtgatgatacaattgcattacaatcagttttagatgctgatgtttggagaaaacaattattaattgaagagacacaaattgaagaaagaattactacaattgagaaattaaaggaagaatttgatgaagaatcattagagatgaagaaattagagaatgaacaatctgatttaaatgataaattagaggaagttcatgaaaaattaagtgaaattgagagtgataaggcagaagctagggcatcatcaattttatttggtttaggttttagtcaagaggcacaaaagagacaaactaaatcattttctggtggttggagaatgagattatcattagcaagagcattattttgtaaacctgatttattattattagatgaaccaactaatatgttggatgttccatctagtgcatatttaggtgattatttacaaacatatccagcaactatattagttgtttcacatgatagagcatttttaaatgaagttgcaacagatataattcatcaacattcagaaagattagattattatagaggtgctaattttgattcattctataatacaagagaggaaagattaaagattcaaaagaaagaatatgagaatcaaatggcagttagagcacatttacaagcttttattgataaatttagatataatgcagctaaatctagtgaagcacaatcaagaattaagaaattagagaaattaccagttttggaggcaccagaggaggagaaaactgttacatttaaatttaatgatcctgaaccattatcaccaccaattttacaattattagatgttagttttggatatgattcaaaaaatttattattaaatcatgttgatcttgatattcaattagatagtagaattgcattagttggtgcaaatggatgtggtaaaactacattattaaaagttttaatgggtaataatataccattagatggtagtgtttctaaaaatacaagattaagaattggatattttgcacaacatcatgttgatggaatggatttaaataagaatgcagttgaatggatgaatgataaatttcatggtaagacagatgaagaatatagacgtcatttaggatcatttggtataacgggatcattagcattacaaaaaatgcaattattatcaggtggacaaaagagtagagttgcatttgcaggattatgtttaagtaatccacatatattaattttagatgaaccatcaaatcatttagatacatcaggtttagatgcattagcaactgcattgaaaaattttaaaggtggagttttaatggtttcacatgatgttacaatgattaatgaagtttgtaaagaaatttgggttagtgaagatggtacagtttacagatttgatggtagtattgaagattataagaaatatattttaaagaaggccgatgccagtggtgttgttaagaaacattaaagttttgtatagtgatataataatagaaccctgataattacttaaaagagtaaaacgtaaacaagcggtaaaaaaaaattttattgaatacgtcatagaagaataatattaattagagtaaagaaagatcttctataatgcttgttttgtaaataaacataacggagttatgcagagataagtgactggtgggggtgatactggtgatgatgatgatgatgaccaatagatacttagatagagaagatcaccgacttctaaaaataaaataaaattcaagtggctggttgaaatgaaaatatttttcaatttcaatttcaattatgtcattataattaattttctatttttagtaatctattttcatttccattttcatagtcatagtttttcgcaattatcgtacctttttcagctgaaatgttttactggtttggtctataaaaggacttatcctccccatatttttgaaatttaggaattgtacccttgatttttttattcttctttaaacaaacaaacaaaactttattacacatacaatgttattcaaaaactcattaattattgctgcatccgctgctgttgctactgctgctgaagatgtttatttagtcattaaatcagataactctacattaaatggtaatactcttggttttaatcatgaaggtgcaggtattaattatgctttcttaggtactgctcctcaaagtgaacctttaagttatgatgcagatgctgaaactttattaggtacttcaactattcctcaaacttttgatgttagtaaatatgttgctattacagttgctggtactaattctaaatattcatttgctgatgataatactttattagttaatggtactgctggtaatttctatgcttgtatgaatactaatgatccttataattattctcaaagtggttatgaattaatgtattataaggaagatgctccatctgattgtatctctgttgatgttcaaagagctgtttcaaataatggtactggttcatcttcttcagttgctccttcaacttcagttcttccttcaactactttatcttcttcaagttctgaaagtccaattccaacaactactgatgctccaaatggtgctaatcaatttgctcctgctggtgctttagttgctgctgctggtattgctgctgctttattatagggattataaacttataacttattttttatttttataccctgctaataataatactatcaatcatcaattaatcactttctgagcatttaccatcgtttttaatttaacttaattttatactatatatttcattgttacctattatatactaatattaaaactatatttattaattaacttatttaataccattctttaattcttgtctccaatttttaaattcctctgttaacataccaccatcattacgattaacatatggtgcaagtaatttatttgtcttttcaattgtattttcacttaaatttataaacatactattcttatttggattaaattctaatttataagttttactctcatcattaattggaattgtctcctctaaccatgataaaataccacttaaatatttaattgattgcattgatttattaacaatttttaaattaggatttttttgatatttttgtacactcattggattattctttattaataatggtatttcctctgtcttaaattcttctacacttctaacttttaattgactatctctaaatgcataaataattcttggtataccaacaaggaaacattgtgcccatgtattcaataatttattttcatatgcaaatactttttgaggatcatttaatggtaaacttgtctttaattcaacataatgtgataaaacatcattaccatcctttggtttataatcccaaacacaatcaacttcagctcctaaaattaatgaagttgaaccaattgttgttttaacaactgtacaatattgttcaatattattaacttctaatttatttctcttttcaatttctttcctagtacattcagaccatggtttcggtaatgttgcaattgtctcaaatttatatcctgaatatgtatattttctatgaatatcatttaaatcttcaaatttaacatatgtattctctaaatgttctctatccatttgtataaataattgaccatcataaacaactatattataaacaaaatgatctctattttgaaatggtaaaagcattaaacttctaattatacctctccaagaaattatctttgatgaaattttctttttatgttccttttcataattaattatacttgctaataatggttcaaaattaccataatcaatttcagttttatttttaaaattagcaaatcctccattaagatcaattccatctgcactatttaaatcattatctgataaataataataacttaattgtgaatcatctaatttataattattttcaatatcaattgaataacaacctaattcctttggtcttttgactgtagtattttctgaaaatttctttattgaatatgctgcttccatctttgtctaatgaatatgttctataataatttctaaaaatattaaattgtaaataaaaattatcaaattcatgcatataataaaactaagggaaaaatttaataaattttcaaaaaggggacgctgcgtctgtggagagtataataatgtgccttttcttctttttataatgggttatactcttaaataagtacttcttttgatgtatattactggtagatgggtatagaagagttagtaatggatagtttatgtgttttatggctaatttaattaaaagtattttcaactacattaaaatattttaaaaatatttaattcaatactcaatatttatcaacaaaatctctttaaatcaataaacttactacaattcccaaactaaaccctccagatagtaaaatctaactcactctacactacatccactatcttagccatcaattaccatcatatccccctaataacaacacataaaacacacaaaacccgctgagcaacaacagagaaagatgttgtattcatatctttcgcatcacccgctaagaaaatttcacaaatttcaattttttccgttttgacatgaatttattggaaatttgaatatatagtgattatggagtcatttctttctttctttttgaactccttttcttttcacaagtcatgagttatacattaactattgctggtaaggcacctgcagttgattatgcattgatgtctgctgctgcattcattaatacttcatctgatggtaatattaaacttaatttccttgattcaaagacaatttcaaaggaaattacaacttccgctcaacttttaaaaggtgatgaatcaatttcaactaattcaattgaaattttaaattattttgcaactgaatttccaaatgttatcttagcaaagaaagattctgaggaatggattaatttctcttatgaaaaattacttgttaaagattttaaaaaattagcaattgatttagagaaacttgacgctcatttaaatttaagatctttcatcgttggttataaagcttcagctgctgatatcgctgtttggggtgctttaagagctaatccctgtcatgggttcagttattaaaaattctgtctatattaatgttacaagatggtatcaatttttagaatctgataaaaaattcggtgaaatggcaactttattatcaacttcattatctgaaatgaaaaaaatttcaaaaggtggtaaaaaggaagttcataaggcaaattttgaaattgatcttattgatgcaaaggatggtgaagttgttacaagattcccacctgaaccttctggatatttacatattggacatgctaaagcagctgttttaaatcaatattttgcaaatgcttatcatggtaaattaattattagatttgatgatactaatccttcaaaggaaaaaactgaatttcaagattcaattattgaagatttagaattattaggtattaaaggtgataaaattacttattcatctgattatttccaaaaaatgtatgaattagcaattcaaatgattaaagaaggtaaagcttattgtgatgatactccattagaaaaaatgagagctgaaagaatggatggtattaaatctgaaagaagagatagaacagttgaagaaaatttaaaaatcttcactgaagaaatgaaaaatggtactgaagaaggtttaaagaattgtcttagagctaaaattgattatactgctcttaataaaactttaagagatccagttatttacagatgtaatttaactcctcatcatagaactggttctgaatggaaaatgtatccaacttatgatttctgtgttccaattgttgattcattagaaggtgttactcatgctttaagaactattgaatatagagatagaaatgctcaatatgattggatgcttagtgctctcaatttaagaaaagttcatatttgggatttcgcaagagttaattttcgtcagaactttattatcaaagagaaaattacaatggttcgttgataaaggttatgttggtaattgggatgatccaagatttcccaactgttagaggtattagaagaagaggtatgactgttgaaggtttaaagaattttattatctctcaaggtccttctaaaaatattattaatttagattggaatattatttggtctgcaaataagaaagttatcgatccaattgctccaagacatacagctttagaatcaaaggatttagttacctgttaatattgttgatggtcctgaattacattctgaaaagaaaccaaaacataagaaaaatcctgcagttggtgaaaaagatgtttattattcatctaaggcattaattgaacaagttgatgcagcggcaattaaagatggtgaagaagttactttcatggattggggtaatgttatttgtgaaaaagttcataaagatgctgatggtaaggttacatccattgatgctaaattacatttagatggtgatttcagaaaaactgaaaagaaattaacttggttagcagctgaaaagaaaactaatgttgaattagttgattttgatcatttaattactaaagataaattagatgaaggtgataattttgaagatttcctcactcctgaaactagatttgtcactgaagccgttgctgatgttaatgttgaacaaatgaaggttggtgatattattcaatttgaaagaaagggttattatatcttaggattctaataaggatggtaaatatgttttcttcactgtcccagatggtaagcaaaagaaataaatttactcttaacaaattgaatagtacagttttctaatttaaataaaggttttttatataaatattataaaggatatttttttaatgaaatatgataataaatcattaattctataaagtttggaaaaatgtatctctagttctagttctattatgactttaatttagaaataatcaaatatcgtataaaaatttcaaaaattgaaacaattacgcttaaaccaattgcaacaattaataatttagtaattttagtcatttgcttctcagctaatgaatccgacaaaatgtcaaagaaatctaagaaaactttacatctatcattaataacttcaactctttgttcaatttctaaatattccctaacagcagtatacagtggatgtaaaccaggttcaatagaccaaaaatattcaggtgtatctaaaacatttgataataaattgacttcactacgtaattgaaacaatctaccagttttagttaataatcttttagttgtataattttgtaatttaccagtaatggctaaagcttttggaagttttgaaatagaatttaaaacattagacattttactttcaaataatgataattttgttgattgtgcaattgcatgtgacattgttaatttaatcaaatgatcaccagattttaatgtaatcatatcattataaatacgtggagttgcaacatctctattatattcaaaatgaaattcctccgtttcaatatcatgttcaggtacaggttttattataagtgataattcttccttttcattaacttcatcatcactatcatcattttcatcatctattacactttcagagatactatcatatttggtgattttattcacatttttaacaccattattatcaactttaggtggtcctaaatcatattcaaattcatcatcctcatcatcatcaaataaatcatcatcaccttcactatcactttcatcatcctcatcatcaaattctccaggttcaattttagcaaatactaaatctgcaagtatatttttttcatgaatttcactaaaattccagaaaacaacaacaccatagtctaagataaacatttcagcatgtttggataagtcaggtaaatttgaaacttttttcttatgttgatatcgatgtttgtggtgattatcattttgattttgattttgattctcgttgtgtttaacattttgattaccatcagtgttagaaatgtcattgctttgcttactttctttattattatcttcagttttcttttcagtgtttgattctgtatattgtcagattgatttacttttatattttctgtagcgttattttgattatcatttgttgtagttgaattattgctatcagtatttccactactagcattgttattactattaggatcagtactcatacttgtatttgattcagttgaagtagttgaattattcgaatttgaacgatcctcttgatctatcatactctcagttggacttgaacttacaaaatattgaggttcagatggatcaaaatcattatttgaaggagaagttgataataatcttgaattttcagttatttcaacattttcattatcagcacctgaataaaattcatagtgataatctctttcttctgatttgtttataaaattttccattaattgaataccacgttgcattttcaatgaagtattcgattggactctataaccattatcaccaggtaataagggtaatgagtaaggaatatataatacttcatcatataatcttggtaaaaccatatgatatttagctaaaaattttgaagttaattttaaattaaaaccttcagcaattaaataagctgtaactcttggatattcattttctcgttgttcctttgttaatttttctgcctttgttctattataaacttcttgaaaaatgttttcagttgttgatttttcctttgaatcaattgagttatttaatttattttcaggaattaaaactaatttttgtgttacttttgatgttcgacttggtaaatttttaacatattgaggaactctttgagatgatatatttgggccaaacgaatcagtcattacaaaacgaggagtctccctctgtctcgaggagggaatatcacttatatctgaagttaatttagatactgatatatttgaatattttgaatttgatgtacgacgcatacttttaactaaattagatactctatctttatttttttcatccttatatctttgttgctccaatttatgaccagcaaatggagcctttgtttgatttttcctaacatcagtaactaaaatagatggagatctctttgcagtcggagttttacctggtgattcagttggtattgattttttctgaattggtaccttattttgaatcattgttgtgaatttaaaagagagatgatgttaactccaatgatgaaaagtatagtagttgcccttataagataaataagctacgtaaaaggctattaaataggttatccccaatgataaacaagaagattgcagctgttaatatttgtaacataatatgatagtaagcacatgtcaagaaagaaattgcccaattgggaaaattcctcggaaaattggcttcattattattatgggaagttttcatgatttcattcaactggaggtttaagacgacactctggttgaatgttgtttcttctgcaagaacaccatgagtgacagtgatgacgatcttttggaattagcgggaatctcctctgctgaggaaagtgaccatgaacctcaaaatgtagtgaagagaagagctggggctagaaagagaggattagacgatgatgaggaggatggtgaagatgacgaagacatggatgatgatatgggtttagatggggatgatgatgatgatattgaagagttgaaccccgaagaagacccgtatccattagaagggaagtataagaatgaagaggataagaatcaattaatgcaaatggatgaaattaagagagaaggtatcttatatgatcgtatacaagagaaggaaaagtttagagaacgtagatttttagcattaagagctaaacagagtaaagttgaatctaaatctataagaaaaagtacctcttcatctgctaagaagttgaaaacaagtaaattatcagaattaaaaagacaaagagagagaaagaataataaaagttcaagaaattataatgatgatgatgatgatgatgaaaatgatcgttaccaagatgaagaggaagatgatgacgatgatttaagacaacttgcaggatataatgatgatgacgacgatgacgatgaagcttattattctgatgatagatatgctgctgctgcaagtaagagatatgcatctgaacgttcatcaagggcaggtagaccaggtagatcaagaaatgaatatgacccttcactctataaagaagcaccacttgatgaaattaataataaaattagatcaactagaactgttcttgaaaaattcctttatcgtgatgaatttgatacttgtattccaggtacagtagttagagttaatattggattttccaaaacaaataacgaaccattatacaaaatggctcttgttgaagaagttaaaagaggtggtaagacttatcaacttttaggaaaaatttgtaatacatatttgaaagtttcacaaggtgaatcttcaactatcattgaaatctcatacttatctaactctcctataacaccaccagaatttgaagcttataagaaaaaagttaatgattcaactgatcatgaattacctactttaaagtatgttcaagataaatttgaagaattaagaaatatggcaactaaacaattaactgatgcagatattaacagaatgatggaaagaaaacaagaaatatctttagataatatgaatatggcagatagagttaagaaattaggtaaattaagagaagatttagaagttgcagttcatttaggaaataaatctgaaataaaatctttacaagaagaaattcaaaaattaagtcaatatttccaaagtagtaaaggtagaacttctaaattagaacaaattaatatcagaaatcaaaaatctaatcaagaattcattagaaaggcagaaaagaaattggttgaatcaagacgtaaacaattacaaaataacgattttagtgatcctttcagtagattgagaactaatttaagagttttctatcgttctaatgataaaaatgagaataatgttaaagaagaggaaaagaaagttgatgtacaggaagaaaagaataatgttaaaaacagtattttcagaagacaaggtattgatgctttaatcaaggatatcgaaattgatttggatattgatttggaagtataataaagaagtattgtaaaaaaaattcttttatattcattatgtaaattatctataaaaacacgaaaagagcaagtctaatttaaaaatgattaaagttagttagtgaaaactaaatattcagataagagacgtttttgaacatcactcaaataaagttgatagatttcttggaaattggatatattttttgttgtacattgtttgaaaaattcaattaataatgttttcatatcatctgtggatctatcactaccacgtttttcttcaccaccttcatcaacatagctttttaattgttcaaaattaccttcatctatatcatctaaatcttcccaaccttcaccatcatcatcttcttcttcattgtgatgattgtgatcatgattctcatgatgttgatcactatgattttgtaatcctggaatttgttcacttgaagtcatttcatttttcaattcatctaaaagtaatctaataattttagcatttgcaggtattttttcaaattgtattggcatttttttagccatcgatctagttataattacaccttctgcaacctgatgaggcaatggattaccatcaaccattaattgacttaaaaattcatcatttgtactgaaaatttcaataaatgcacgtacatttgaaaaaattgaattataaccacgcataacttcataagcttggaaccaaattggtaagattttaacaattgcaggttgttcatcaatttgaaaacttttcaaaaatgaaagtgttgcctgtggttgagaaattgctaaattattgaaaattaaaaccatattttcaattgttggaacttcctttgcatgaactaatcttattgttaaacttttcaaaatatcattcaaatactgatcgatatgttgatgaaaattatttaataataatgaaattaaatcacctaatttaacaatagctctgtctgacatatttggggacaataaattagagacggttttcaataatatttgaataccattttcaccagatttagtatcaatatactgtccacataaatcagttgatgttttaatgagttcaactaaagtttcagaacttgattgaattaattcatcatcaatggttgtgtttataaaatttgaaattattgaaaatgatgaatcaaataattctttagataatgataagtcttcacctttatttttcaaaaatgttgctaatacttgtaaacttagatctgtacttgagctataagtttcactgtgattggaaactttttctaataaatatggtaaaacaaaatgcattaatttattatattttgattgttctatatttttgaggagatcatcaatacattcaaacattgagttgtttaatgcaaagttagattcaccattaaatccaatggttaagattaatttcaaagtatttgaatcattaacaaggttttgattatccattgaaatgactatagtcaagacttctaagagcattaaatttgtatcagcatccgagttttcagataatttataaacaatttcaattaattgaatttgaatatctttattaaattccttagctctaataaaatagttaaaatattgtaatgacattaaaactgatgctttaacatattgtaaactttcatgatcacctaatttttgtattgatgagcaaatttgattaaagcattcaacactaaaattattatcataagctgaagaatatttgaataagaattttggaaccataagaatcaatctggaaactagtaaatagaaaacattatcatctcttaaaacatcttgtattatcataaatgaactttttaagaatttttcaaggtcaaaagttggttcaccaactatactatcatcattatcaaagcaacatcctaataggaatgtaattgcctctaattgtaaataagttccgttacttgagtctttacaattatagaatttttcaatgagtaaatttatgaaaatcaagttatcctttgcattcatttcacttaataaatctcttggaccatctctaaacattatttcaacatttaaacctgattcatcagtgacaaattcattaaaatcatcattataggcttcaactttgttcattgataaagttgatatatttaatattggatcaagtatttgcgatattttgtttacatcattgacattttccaattcgattaatgtttgtaagaaactgaattcttttaatattgtaaatgataagaactgtgatagatctctaccttccctctgtgttgaaagaaaatgatcaacatctataaatatggatttcaaaaagttgatatcattgtaatctttagactttactgcaacaacaattgattcttgatttttgatatcttgtaatactacattgaatgaatcctggatataattttcctaaaatattggcaaatgagtttatcaaagtatttaaaatagaataaatctcatgcttgaaatcccaaacaactaattgattgttgatggaattttgttgtgataatgaggtgcaatttttgagtaaaagttcataaacttgaggaataactgtatcacagaaggcgcctctattagcaatttcaaaatcaacattatcgaaggattgacatagtattttcaataatcttaaagtttcaactttcacatcaattgtataattatcattaaccaataaagtttcacaggtatttaatacttgaatagcaataccaccttcaaataattgttcatcagtaacaacatcatcgaaaatttcttgtaaaactaataatgaaccaacgacagcaaacattgatgaattaatatcgatggttgtattatagagatgattcaataaggaaggccattcatctggataatcgactgctgcaatttgaacaattgcataagctgcacttgatctaatctttgaatcagaatctgcgaactaatgttaataaagaatcccttaataaacttttaacatcttgattaatagtattaggaccaataaatttatcaaaagccggtgaccaataaaatgggacaattccttttcaaatgtagaagagatgattgtctaatattaagttgattagagttatttaaggctatttgaatgagcagagatgagaatgaatttggatcgaattccatgaaatgtttgaaattgagttcagattggattctgacggtgttatctgcactcataagattatgcagcaagagctgcatgtcattgataccaagtgaagtctccatagtgtgccaatgggggtattctactacaaaaaaagtatcctaataaccaataaacccagtattgacagtaaatactgaaaaactttcatgtagtgaaacacaacaaaagacgtgtcacaaaaataataatattatccagtgcaccagttaaaaactgacttttctgagagggcgagagaatggaaattttgactttgcttacctggctcagttttaagtttatttgtaatggaacatcttcttttggatggtttatctggtgtatcgataagtaacgtgtttacagctctgcaaaagtagtcaccggtagataatatcttatagtttttatatatcaacttgttataattaattaatacacataatatacacatatacacataatttaataatgtccttcgataataaaagtgattctctattttcagatgatgaagatgatttttgtccgctttgtgtggaagaaatggatataactgataaaaatttcaaaccttgtccatgtggatatcaaatttgtcaattttgttataataatattagaaataatccagaattaaatggtagatgtcctggttgtcgtagattatatgatgatgaaagtattgaatatagaaatattacagctgaggaatggaaaatccataaggctaaattggagaagaagaagaaagaaagaaaaataattgaaaaggagaaaaaagatgctgaacaggcaaagagacaccatttagctggtatgagagttatacaaaaaaatcttgtatatgttgttggtttaaatccaccttgttcatatgatgaaataattccattattaaaatcagataaatattttggtcaatatggtaaaattactaaaatggttataaataagagacaaccaaattcaacaaatataaattcaaataataatataaataatcatatgggtaatccaccttctggttatggagtttatgttacatttgcaagaaaggaagatgcttctaaatgtatagctgcagttgatggttcaattagtgatggtaaagtcttaaaagctgctcatggtacaaccaaatattgttcatcatatcttagaggtcaaccatgtccaaatcctggttgtatgttcttacatgaacccggtgaggaggctgactcttatttcaaaaatgaattggccaataaggctcaaaaggccttacatgaaaatgcatttggttattcaaacaatggtataagaccaacaactaatcatacaagtattgaagatttaatgtattcaccacaaaattctcctcattcatcaattgcacaattaaattcatctacatcagtgccattaaataatgcaatttcatcatcaaatgattttgataataatggtccggcattaccaccaactgtttcatgggcaaagagtaaacctcaagaaatttcttcattaactgatcatattcaatcatcagcattcccaactttgaaggatgtattacaacaaaataaaagtaatagtaatattaataatgatcaattattacatcaattagatcaaaatgaacaacatcatcaacaagaacaattacataatttattacaaaagcaacaatctgaatgtgaaccaagtgtttctaaaaagaaagagaagaaggataaagatcaacatatgaatgttatggatggttgtgcaatttcatttaagacaattaatgatagtttgaaagatcttaattcaaatcctgatcttgattttatagttgatacaaaattcaaacagcctgaattttcaattgtatcttcaaatattaaaatgttccatagctttaattcatttgtttcaaatgttgagaaagaggatcaaaaggaagaaggaaaagaagaaagtcaaccatcatttggatttttcaattcaactaataaagataaaatttcacaattaactgattcaattttattctctccttacacaagaaattataattatagagcttatattcaagcacttcaaactgcacaagcacaagctcaagcacaggcattacaagttcaagcattacaagcacaagcattacaggcattacaagctaatagatcagttggtgatatttcatctgatcaatctaatatgaatacatcacaaactattgatccaattaagggtacaccgcaaggacaacaagcacagctacaatcccaagcacaatcacaggcacaattacaagcatttattcaacaaaaaatacttcaacaaaatcaaaataagaccaatggtgttttaaatagtggtaataattcaacaactggtacaccaattactgcaccaccaggtttatatcacagtgatccaaagactaacagtcaagaattattaagtcaattgttaagtaagaaaactgttgcttaagtgtttctttataaatgtttataacacgtatataaattgtataatattttactaactgaatcattaaattttaatcgcttaaaataactctttcattaccaactgaattatcttcaatattatcagtattctcatgaatatcatcttttaagaacttttcattttctttaactgattgaacatcttcatcttcgtaaaaactataactaacatttgggttaaatcttacattacttacaagttttgtttcagttttaggtttagttaaaagtagattatcattctgattcaatggagtttgtgctaattcatgtggtatttgtcttgtaacacatgattattattcccagtattattattattattattattattacgaaatcttatccttgaaaacataatatttggaatcacaatggaaaataataataaacaaccaatacctaacattgttttcaatgatattgtatcgaaaaatgtattcatacaatctgcgataacttcaaaataagcctttgaagtaatgacatttgaaggatcttgaatcatacaactttgccatttattacatctctcttctaatgcaggtactcttaaatctggcgaacaattatttaacatataatctcttttacatttatttatattgtaaattgaatcatttatataaaattggattttcttattaacatctttcttgattgtgtaaaaggcaagtgatgccaatgatagaaatattaaaatcattaataaattgagaataatttgtaaaaatagagttaagttggaaacgtatagtggatcagaaaatatagtgtataatttttcaaaatgttgtaggaattggttgtttatgtattcgttgggcatcatgatggacttctctcttgaatctatttcttattaatgattttgatgttaatgttgaataattactattaaatgatgaattatcagttttatcgaaaacatcatatgctgttttaacaattgattcatcatttaaattatttgtcatttctagctttttctgtacttttgttaaatttggacttaaattgaatatatttcttggattcttaggtattgtaagtttaattggattggtattattattggattgtttatttattattggagttgattcaagaatttcgtttgatattattggtgttgaattattcaataaatttgaaattttctttttctctaagagacttatctctggtgtatctgttttatcatcctgtgagtccattatggggtcttactgggtatttggggttggtactttagagagaaaaaggtgttatttactagagtattttagtatggatctctctcgcatataggaaatttctattattatacaaatcgatttaatgttaatattatattcttaatctttttaaatatacaaagataaacacaaattaataacctaatgcaactttcattgtataagtagcagtaaatggtaaacatatcactaaaaagatataatgaaagatataaactaatgcaagtaaatccatttgaatatgatttttaccatcattgggtgtatagaaagcagtaatgtatagtaaagaagttgcaggtggaacacaaaattctatatttgaaacaaaatatagaatatcttgatgataaaacaatccatctctataaattttagcattaagtgcacaaccaattattgggaatataaatattttcaaaagtgtaattacaattggaattttccataattttttaggtaaactatcaattcttaatctaccaattgtaccaccaaggaggagtaaaccaaatggaacttgtgctgcacctatataacttgcaaaatccatgatgaaagataatggaggttgtttatcaggagcaggtgataaatgaacttgatttgaattaataaataatgcttgcacccagggaatcattgaaattgcaattgataaaacaacaacaattgaagcaggttgtttaaaagaatctttccaaacatcaacaaacccccaaaatacctgaattccaattaattgaacttaattgatatttaaatttagccaaaggtgataagtttttttcaatttgatcatcttttaataattttgataaatcttgttcctctattaatttatcatattttgaataaactctaactatatcattaatatcttcaggatgttgacccatttgatcattcattgtaagattattaggtaccgatattgatactctactattttgtcttgacattgaattatttgtgagagttttaagtatattagaagtttgatttattacgttaggtaaatgcattatatgatttgatgaggattctatggaatgtgagtctattgaatgtaagtctattgaatgtaagtctatggagttgttattatgagatatggatatcttaggatgaattgtatcgttattattattatcatcatcatcatttgaattcttttctctatgtgtatttgaggatgatgatgatacatcaaatgaggaatgattttctaaattattttctaaatcattattaagatctctatcaccatctccattttctatacttttctctaattgcattttcaaatctactttaaaatcatattcaattaatttataagagccgaaagtaaattgtaataataattgtaaactcatataaatcataacaaatgaaactcctaaatctacattttcgaaaatattagaagtttccattgtttgtaaataagcaattggtaaatctgaaatatttggtaataaaccacataaaattaaaccaccataccaatttttaggacaaccaactaatacaccaaccccgaaaactgctaatgcctgtgagaacatcataaaatatgcaataataacaattgttgcaatttccttaatcattgtattattaatattagatacgattttttgaaatgttaaacatggtattaaaactcttattgcaattgtacttatattccttgaagtatccacagttagtatatttttccttgataaaaaaaatcctacccctataataaggtatattttgaaaatgggtttaactgcagagtatatgacctctcccaggggtaaagatccatctgccactaccatattgtgtgtgttgtatgataatccaagataatctaagataaactaaggtgaatcatcatgtaaaagaccaaaagcatggctttaagtaaggggaatataaatttttcatcggtttctcaatgcccgccctctttttattgcctctttgggaagtttgacagtggggggagttaatatatagataagataagataagataagattagagaagtttatacactttatacttactattcatcactgtagatatgaccctttaaagtcaacagtctgccaccatccatacgtagatttcttccatcgacatatgcaccacctttactacacaaaaatataattgctgctgccatttcttcacttgaaccttctcttctagctggaactaaatgaacatatttcatattagatgatgggtcatccggtgccattggtgtcattctacttgcataaagtcccggtgaaattgcattgactctaatatatttatctgcaaattctgctgccataattctaaccatatgatcaattgaaattttacttaattgatatgttggtacaaattgattattatgaactgaacatggcgatgaaaagcaaataacaacacctctaccatcacctttcaaggctgcttcacctaatttttgaactaaccccgctgtaaggaaatacataccgaaaacattaacatcaaatgtatctctaaaatcattccatccaattgaattagttgcttcatgtaatttctctaatgattcacctggtgtaaatgtaaccttattttgtcttcgtatacctgcacaattgattaaaatatcaacattttcataattcccattaataaattcaactaattccttatttgacttttcattaccaatatcataacataatgaagtgatgttacatgttgatccagtctctttcttaatttcttcacaaatcgcaatagtttcatcaattctatcttgaaataaatcaactaattgcaacattaacatcatttgctgcaaatcctttacatatcatttgtccaatacctgatccaccaccagtgacaattgcttgtctacctgcaatttcatataagtttccaatcttaaaacttgacatccttgtcataaaagagttaccacaccaaatactactaaaccataccctccattcctatttaaatactcaataactcttgctatccattggttggttatgtcaatacatatcaatatcactgttaaagcgaccaaccccagtaaaatgtcggaattccccacgggttcctctcgggaacttctccctcgccttcaaatttccgccgattgtcgaatttcaaaaggttgctttctttaaataattctatctaatatatcaggtatttatggtatttatatatctagaatggaatggatcgaagagaagctataatgtattatagaaataattttttataatacaatgaaatacgttactttaggagactcaggattgaaaatatcacaattaattgtcggttgtatgacatttggggcaaaatctgaatatggtgattgggttatggaagatgaagatgaaataatgtcaattttgaagaaatgttatgatgttggtttacgtacttttgatacagctgatatgtattcaaatggtataagtgaatcaattattggtaaatttttgaaaaaatttaatataccaagatatactgtcgttattttatcaaaatgttattttcctgttgattcaaatactccaggttttgtcattgatggtattaaaaataaagatcctgataatatgaaatttattaatagtcaaggtttatcaaggaaacatattttcgatgcagttcatgcatcaattgaaagattaggtacttatattgatgttttacaaattcatagatttgatccatcaactccaatgttagaaacaatgagagctttaaatgatataattaatgaaggttctgttagatatattggtgcatcatcaatgagagcaacacaatttgctcaattacaatttactgctgaaaaaaatggttatcataaatttatttcaatgcaaaatttctataatttactttatagagaagaagagagagaaatgataccattttgtcaagaaacaggtgttgggttaattcattggtcaccaattgcaagaggtattttagctagacctttaaaaatgttaatcgaatcagagagaatgaaatcagatatggcaatgaataatataatgaaagatttatcagattttgataaagaaattattattagagttgaaaaaatttcagttgatttaaattgtaaaatgtcacaagttgcaactgcttgggttttaagtaaaggtggttgtccaattttaggtctttcaagtattgatagagttgatgaagctgttgcttcattagatgttaaacttactgatgaacaaatcaaatatcttgaacatccttataaaccaaaaactgttagaggtttttaattgtgtatttaatagcttatttaatataaattaaaaagatgattttcagaaaaaaatatgaataaaatataaaagaaaagatataaaagatataaaagataaaagatataaataaactatctatgctaagaacttttcagcaaatatattaaaacgagttttagcagacttagtctcttgagcttcctcaattgcttccttttcttcaacttcatcccattttctaccataatagaaattcatttcttcaggtttttttagcaatgttttatgtcttaatttataataagcataacaactaaggaataatggaacacaaagataagttaaaaagaaattttcaactctatcccttgctgacatatctttaccacctaatgggaaaataccaatataaaattgtgcaacgaataaacagaaaataataaacgacgaagtataagttgtccaagggaataatttatcatataatttaaattttttaaaattaataccttgagcttttaaacctgatctaaatctaaaatgtgaaaaataaattgctaaccaagtaaaataaccatttaatgcacaaagtgaattaaaccaattataaacaacttcaccagtatttgaacaatttaaaaatgctaaacctaaaccaataacgaaaacaattatatttgcaatccatggacgaccttttgaatcttttttaccaaaaactggatgaattagatttaaatctgataatgcaactaatgaacgtgaaccaatataaactgatgaattaccacatgaaataactgataataaaataagtgcattcaatatatcaggtaaaactttaacaccaccattaatcattgtaataatgaaaggagaagttaatgaaccacttgcattatttaataaaggatcatcataaggaacattcattgtaattaaccatgaattaccaatgaaaaagatacacaatctccaaaaaattggagtaacacatcttggaatgaattttcttggttgtttaacttcacctgcaacaactgcaatatgttcaccaccaccaaatgaaaatcctgcttgagctaatgcaagacaaataccttgaataccatttctatcccaaccaggatttttccaatatttataaccaattggaccaccctttggtaaaccaccacaagttgcaactaacataaataaagttgcacctgccattgcaacaattttaataaaggattgaacatattcaatataaccataagctttaactggccaaacattacaaattgcataaattgcaccgaaaatgacaatccattcagcagttgtgacaatatgatttgaatcccaatatctaataatattaatacctgccgttaattcagcagctaaaacaaccatccaattaaatgcaaaattaatacccattgcaaaagcccaagattcatcaagatataataaaacttgattaataaatccaccatgaattggttgataagcagtcatttcaccagtttgaataaacataacataaacaatataagcttcaattgtataagcaaaaacaataccaaatggaccaccatttttcaatgctgaacccataccaacccaaaatcctgtaccaataccagcaccgaaagtaatcattaaaacttgacgaccagtaatttgtcttttataaccaacatctgaaccaacataagcatcaactaatttttctttatcagcatttgatacaactggtgggaattgatcaatatcaatactaccactttcatcaagggtttgaatttcttcagtgaccattgatttacttactgtaccttcaagaaatcttgacattgtttgatgaatagagggaagataaatttttgataataagaagcttaaaaatatgggaggaagtgaagaggtttatatacgactttactctacactctccgataccagataacacattaattagataattagataaagaaatagatgaagataaaagtgaaaattgcaacaatagatcaaatcaaagtgaaaaatttgcgttctccgactttttcactaaatctgtcggtattgatagaagactgatagttaatgactgtttatctcttagatggggtatattgatgtagtaaaagcattccggtagtatctagaaggtattcgcagagtgtttatctaataaatatctaataagtatctaataagtatctatttgggtatatctatcaaatacgtttcttatcagttaaggtacagccgcattttgattggttgattaatatatctattataattatttagttacacattctatacaaatctagattagacagtagcagcaattatcttatcgccaagatcaatcaatccatctgcgatgatatcaggagcaccgaaaatatcttcacatggatatttttcataaacattagtccaagcagttttaaagcctgctttcttagctgcacaacaatcccacatatgagcagctccaaaccatgcatctttaccattatttggtaatttacttaacatatatgtgtaaacttcaggtgttggtttaccaacacctaatgaatcacatgaaattatattctcttctggcatttccaaattggaatttttaaaataacctttaactctttctctatcaccatcagttaaacaccaaattgtaaatccattttctcttaattttgaccataattcaggtaattcaggtctacattttaattttaaccattcattacttaaatattctaagtcctcctcacttgcaaattcctttggatcttcaataccagcttgatataatgttctgaaaaatgttgctctaagaatcttctttgttgtttgataatttccaatttgtgataaataggaaaaatctctttcacaagctgtaccccatgcattgaaaaataattcaggattacattgatatttaagtaatttatcgccaattctgttagtaattgcatcaatcataacatcataaccaatacaggtaccaataatatcgaaaacaacgtcaggcattgtaaattgtgttgtataaggaaggaatcattgaaagaatgggtagaccatactggaaaaccttggtatttaaatgaaagaataactggtgaagaaactgtctcttattgcgatgttttgcagtgctggagcgctgtggtgacttctccgattacttggcgggtatacatggttatggatgatatcttgtagggttgtataggatatgattagaatatgattagaatatacaaaatacacactacaatacaattacaacttttgttctctagttaatgcaagatatccagtatctcttaaaattgtatttttagccttatccaacctatcacttgtaagcatgaaaggttttggtatattagtctccgtaacaggtatattctttaacatcatctctgcaattgcctttgcactaaggaaaatacgtggcataccatgaccatgaaatccacctaataaatatttatccttacaatttggaatttctccaatccatggtaatgcatcaactgaataacctaaaatacctgtccatagataatcaacttcagtttcataatctttccaagtataaaagttttcttgcatgaaacttttataaaaatctttaatttcattatgttttgggaaaacttttgaatcatcaacatttttataccattcatctttatccttaagataaaaaggttttgcaccaccaacaataactccaccatctggtctattaattaaatattcatgattagagaaatcacgacaaataccatatgtattacttaaatatggtgcaaatttatgtttatttgtaactttaatatgtgaacaagtacccttaactggtacaattttatcttcaaactcaggtgctaatgttgcagtatatgcatttgtagctaagacaactttcttacatttaataacacctctattagttttaacaataaatccattatctccatccaatttcttaatatcaataacagttgtataagtttgaatatttaatcctcttttaataccaaattttaaaaatcctttaaccattttataaggccataaatgacctgcagtgaaagttaaagaaactggagaattttcacaaattgaagtaatttgtgcattcttaccagtttgaacttgaatatcatttaaaacttttgaataaagatttttctttaatgcatccattgccttaagacaaccattaactgcattttcagttaaatgaacattacatgctctagttaatactaaatcacaatcaattttttcatcttcaaatgctttcttcaatgcagcaatatgatcatattcaaaattaccaattgatgcagcttgttccatacctaaatctttctcaaatttaaggtattctctataataatccggttttaaatgaccaccatttctacctgttgcacctgatgcaatatatcttgattcaaccaatactatctttggcggtgttttaccttctttaccttccccttgttcttcttcttcactaagcttatatgtccaataggcagttgcagcaccggcgtaaccacctccaacgatgagaatatcagtttcctgtggtaaatccggtgtagatctgatatttctgaattcatcctcctctgaatgccaatatggcactgtaggatcatcaactgggaagtactgtggcgtggtcattgtctatatgttatcttatacgttatagctacatcatcatcaactacctggggatggtagtctctatttatgcaaatcttcggacaattgactgataatggtaataaattctcttatcagtcccaatggggaaatcaccgaccgttccatggaagttgtcggaaaggcattgtccactgttgggaagttgtataaatatggttcacttcttcctcttgggatgggtaagtataggggatagtatttacaagacaaagacattatggttgttaaaagttttaaattaagatcaggagctgaaattccatcaattggtttaggtacttgggcattgaacggtgaagaaggttataatgcaattttatatgctttaaaacatggttataaaatgcttgatgcagcttattcatattttaatcaagattatgttggtaaagcaattaaagaatcaggtgttaaaagagaagatattttcattgttgataaattagcaaattcttggcatacagctgcagaggaatgtttagatattacaatgaaaaatttagattgtggttatttagatctttggttaatgcattggccatctccacttaatcatcatggtaatgatcctaaaactccaacattacctgatggttcagtagattttgaaaaaaattggacttatgtagatacttggaagaaaatgattgaaattcaaaaaaataaaccagaaataatcaaacatattggtgtctctaattttagtattgaagaattagaaaatatcatcaatgaaactggtgttattccagaagttaatgaagttgaattacacccttccaataatcaacaagaattatacaaatattgtcaaagtaaaggaattttacttgtcggttacagtccattgggatctagtgagtctacatttttcactaacccagaattaaaggaaattgcagaaaagagaggtatctcaattgcacaaatattactcagttgggggattgcacaaggttggccagttattccaagatcacaaaaccctgcaagattatctgccaatttggatcttgtagatctaactgaagatgaaattgccaaagtaacagctattggcaatgcccacaagaggagattcgtccttgcttcatggcacactttctccgactgattaaggtaccggaaagaccgacattttccttatcagtgtcgctattatggggaagttctttatttctttatcttatcgataatttgtttataaactgaatatcttctttctatttataatattttcttctctatattatgtctcttttaataatactctcatataggtaagcaccttacaatgtcctgtgaatgttgttcatctctttgttcatcaggttcaattccacctgtacctaaatcaaaggccgaagatgaaagattagaaaatattaggaaaaattctccaaaacctttctatattcatacaacaaccttatttaactctaaaaccatgggaattgaagaaaatatatcttttctagttgatccagctattggacttataattgagaaaattcaaagaccttcatcaactattgaaaatttgtcatcaaatgatattgatcttagtggtaaattcgttatgccaggttttgttgatgcacatactcatattttcctacattcatatgatgaagcagataatgcaaagcaaaagagagatgaaagttttgttgagagagttattagagcaatcaatcattgtaaaattgcacttatgagtggatatacaacatatcgtgatttaggttctgaaggtatgcaagaggcagatgcaaatattagagattcaatcaatagaggtttaacaattggtccaagattatttgttgcaactaaagttttagcttcaataacaggtattaaaacacatacagaaaattcaattggtgggacaaaaatacctgaaacaagtcatgcctgtgatggtgaagttgaaattaggaaagctgttagaactagattaggtatgggttgtgatgttattaaattttttgcagattataggaaaagaattatgagatatcccccattaacacctcatccttatatttcatcaattcaattcccacctgaaattccaaatcctgatattgttttatatactcaacatgaaatgaatgtattagttgaagaagctaaaaatgctgattgtccagttgccgctcattgtgcaactaatagagcaattaaaatggcagcaattgctggtgtttccaccgtggagcatggttattggtgtgataatgaaactattaaacttttaaaggataataattgtatactcgttccaacattaacaattgctgaaagattatttggtgataattttcaaactatccttgctaaaactttcaaagcttgggaaaatggtgttgttcaagcttgtggtggtgatacgggtacttttaatcatggtgaaaatattcgtgaagcagaattatttgttaaatcaggtataccaattgctgatactttaaaatcattaacttataatggttggttagcttgtggtggacatagatgtggtagagaatttggttggttggatgttggtactgctgctgatattgttgcattggataaaagtccttttagtgatttatcaattttaagaaatccttcatttgttatgaaagatggtaaaacttataaaaatgatggtaaatgtattgtataatttatctagttttttatataatcaatatacaaacaaaaattataaaattggatcttcaatttctttaacagtactaacacattctaaaaatatattaacacctttctctaaatctttaatatcaatagttggtggtggacaaagtctaattctagttccaccagctgcactattaacaattaatccctttaatgcacaatattttgcaattcttgatccattaaatttatcatcaattaattcaggatttaaaacaactgcacgtaacatacctgatccactaacatctttaatcccatctaatttaccatttaataataattttttcataatttcacctttttcaatagattgtttacaaattctttcatctattaaaacatctaatgctgcacatgctgccgctgtagctggaggatttgctgccattgttgaaccaatatctcccagatcaagtagatccattacttcaggattaccaataactgccgataatggtgcaacaccaccacctaaacctttaccaagacaaactaaatctggtttaacatcatcatcccatgatttcaaaagtgcaccagctctacctaaacctgtttgaacctcatctgcaatgaataaaacattatattttttacataatttaaaagctttattaagataaccaattggtggatcaacaatacctgctgaaccttgaattggttcaaccataaatgcagcaattttatcaccatctttctctaatgcttcttctaatgatttaatatcaccaaattcaacatatacaccagatggagaaattgaaccaacttttggaacataaggaccaaataaattatgtttctgtgaagaaaatgaatgggttgaaattgtaataccatgataacaagcagaagtcgtaagtacaaatgcttcatcttctttaataccttttttcaaatacccccattttcttgcaattttagttgcagtatcagttgcatcagcacctgataacatacaaacaattcttgaataacctaaaattttttcaatttttaatgctaattctgcataacttggattaattaatgctgtattaactaatggacattcttgaattgccttacatgaagcttcaactattttaggatgtgcatgacccatattagcaactgcgaaaaatgataagaaatcaatatattctttactattaacatcccataatgttgaattctttgatttagcaattgcaactggtaatggtgtaaatccagatttaacgtgtgtatgataatcactaactatttgattcattggtaagtgaaagaaagaagtaaagaaacaacttagaaaaaggaaatagaagatcagtcatattaataatataagagtatttgaaaaatctattcataaacggagcggcgcaaattttgttaatgttgtcgcttatcgtgtggattacccgattaggcaattttgataacaaatgtgcttaggtaatcgtatacttactttaaagtacttatatcccagttcattaactgtgaccattcactgagtagctgcttttccactgctgacatagatgtatcatcattgagtgataatgcagggattgaatgttttatgaaattctgtctctgatgatgaaattgtattaacctggttcatttgtaaaattatttgcaaaattacccattttttcatttagtaggaaacaattgatcaggtagttgttgttgaaatctaaattggaaacctttcatttgttcctgttttagcattttgtataaaactttcaactttttctttactctcttcattaacaggaactgaaatattagctatatcaagtaaatcatccttcattctttccattgttgaaataatggaaaatgagatacctttttcaactgctagatcaaatattttatcattttgctctaagactttaaaataatatgatccaatattcaaaaattccttataatatttcaaatattcaacacattcattataatatatatttgcatcttctatatgatcaacataatgagggaaatgttgaatatacgataataatgtaccactagttaatccaataaatccattgaataaattacaagtatattttttatcattaagtctacatctctgtaagatagttgcaacatcacaagctgattggaaacatacttttgctgaatttttccaccaatctgtaggtgcattatttaaccaaggtaatttagtcaaatggacccttagcacctgtattatcacttggaatgaaaggtataaattctctatgtaatataattttagaaattaagtaactgttaagtgaaatgaacaatatagactattataattattatggaatgacaaatttatattttctaaactaaatttattatcatttggtaaattattttgaatttcagaaattttattatttaattgaaaccattcacttgaagtattccatggagcttctttataataatatttaccaccatttgaaatccaatttaaacaatcaagccatgtctcagatgataatattaataatgatgtgaaatcattagttgttgaaacatcaatatccttgatgaaagttaaattatcattaccattagaaaatggtaattgaaatttatgtaatctttttttaacatcatttgaagattcatcacgtaatgataaagttataagttgataagaccaaatagttcttaaaaataattcttttttcaaaaatggtaaactttcaatattttccctatataaaagtttataagttctctctgccataccaccaattaaataacctttaaaagttttacctgcttgccaataaattaataacattataattaaatactgtaaagttgaaattaaatcatttatattactttgtaattcattgaaaacatttgattcaagttttttcaacatttcaaaattttttttcttatttgatttattagtaaatggtgttgataataaataagttgaaaataaaactaaataatttaaatctttagaaaatgttaagaataataattcaggatgatttaataatgatattgatactgccttttcaatttgtttatcatttaatataaattcatttggtttatcattaatactttgttctaaattacgcattttaatgtattcccttgtggtgtataatacacaggtatcatcttcattaattgatatacaatatttacatggaccctcattttcatataaacactttactttccttcttctacatgccaaacatgccctggatatcttcatagctgacaattaaccccttacaatgaacaaagggtttgtgtatatactaaatataatttcataaaaccctacataaaatatttgagtgaggtcagtttttcatgataagaaaaaataacggagattagaaacttttatttatttacttagttaaacacttattttataaactttgaaggaacttacaaacagtttcacaacaatcatcgattgcagtttccttggaacctttaccaagagcgtgtaaaccaccatcaattaatttactatatggagaccaaacttcagctttagttgcagccttaaatctactcattaataattccttatcaacagattcaggaacatattcatctgaaccactgtataaagttaataaaggtttatcaactttaccataacattccttaagaacgtcatctgtaagataagaagaaaagaaatcatcatcaccatttttagaatataatgcataccatctataagcattaattggagtatcaaaccaattaactgtatatttatgaggcattaattcacctggtctaccttcatctaaatattttttagcaattgcattagcttcttcaattgtttcttcagacattaataaagttgcagcttctctatctgagatacctgcttgtaaaataccgaaatctaattcaatataattttcatctctttcagctttagagaaataatagatagtattttgacaaccagttgaatgacccattgtaccaatagtttttccttgaaccaccttcctcagatttaaggaatttaacaagtttagcgatttcactatgatctcttgctaatgaaccggtaccccatccaattgatgaacttgaaaattcaatttgaattaatgaccaaccgattttctcaagagcttttgctaatggaactaaataagcaacagttgcaaatctatcacctaaaccagcaataaataatacaactttatcggattttaaattaccaaattcaaaagcgtgttgtttaaaaccgtattctaataatgtaccatcaatacccatttttctctatatctttatatatttcttgatactaaaaagagcagtcaccaaccattaacactgtcataaatgtggacacgctctgtctcttatataaataccatcaaactacccccagacataaaaagaaatgaataaactttgatattttgaccgataacggctatcgaaataaattgatatgcgatctaatgcgacatttggcgagtattgccgtacttaacaactgatagcggttctttaacgtactttaccgtatcatattggtgtatgatatgtctgtgagcatgttaccttgggagtgagtgatctttgtagataaggaatgataacggggtgtttccagtgtaacggattcataggataaataccatggttattcccgtttataatacatttattatacgttattgttatttattaatacttcagtaaccaatactatgtctgaggaaaaggttgacatttcaaatgataaaatagataccacatatgtctcacacgagattggtagcactttttcaaaagataaagttgatgaggatttttatttacaggaaccagatattcatacaagaatgttttacgctcaaagatttattgaaactcaatactgaagatatcaaatctgaaaagtatttccaaagatggaatgatttcatatttaaatctttgaaaattaattcattgaatgataatggtgttgaatatcctaaatgggagaataataatcttgagtatgagaactggtcattggatggttggtgttggattggttacttcagaaattatgggagcttatcttgttccaaattcaatgtcaatgcttggttttgttccttcaaatatcctattggtggttttcttctttgttactatattctcaggtggtgttatctggtgggtattccttttattcgattctcctgaatatcctgttaaaacttttgctgatttagcttatattattggtggtcaaccattcaagcaaattgttattttcttacagttaattgctgttattttatcaacaggtacaattgtctatagctgcagctcaatgtgctattcatacttagaactgatagaatgtgctgggttggtttaatggcattaatcgcaggtttaatgatgtgtatttcaagtattaaaaaattaagtgtcattggtaaatattgtttggttgtctcattctgtaattatattaacttatttgttcaattgggttatattggtaatgatccaccaaattgggaaaacgcaatgagtttacttcggtgttcctcaaggtgcaattgaaacttttgcaattgtaccaggtcaaagtttgatgaatagagttgtttcagtctctaatttatcatttgtctttgcaggttcaattgtttttcctgaagtcatttcagaaatgaagaaaccttgggagttttggaaaagtatgtgtactgctcaatctttcatcttagggatttacttaatttatggtaatttcatttatgcacaccaaggacaattctcaaatgtacctgcagtttttgggatcagtgatgaaaatgctttgaaaggtttaggttttatgacttttattacaagctttattcaaggtatcttttatggacatattgcttgtaaaataatttacaagaattatattccaattttcaataaatcaattaaattgaattctaaaataggtttaatattatggattggtattgttatcatcacttggattgctattttcgtcattggtgcaggtgttccacaagttggtgcagtctcctcatttacttctgctttaacaatgattccattaacttttgttattccattcattttacacatctcagcattatatatcgcaactaatgaaaatgatattgttgattacaaaccttttgaaccagtaacttcacatacttccttggtacaattttggaaaaatggttactctaaatattggttgttgtctatattctataccggtttatgtttagcttcattatctttgtctggtatgggattatgggcttctgttgaatatatgaaatacattttcagttcaacaagtgctgattcattctcttgtgtttctcctgtttaatcttttttgtttattgctatttagtatttttttttcctaattataatacatcgaaaacgtgattctttattattgtttatttgtaagacatttaaatagacttatgttgagcgaaagttgttcaatttggacaactgtgtagttagcatctaaaaatcttgaaaataatgtttacaccttaatgaaattcaatcaaattttcgtgattcaacaacacttttaaatagtataagtaaaggtttttatttaaaagagatattcaaaaagctgaaatttagtttttcaacattaattattaataatgattaactttgatcattctttgtgttctttcaagcaatttttcaataatttttctatgggaaggtaaaactctattatacttttattttgataactaagttgaaatcaggaaatcagtttccaaaggatatcaaattgatcttttttctttctaatgattgcattagtttttcatcaatgctaataatggttccaaactagttgtaaattgatcattatacatacttgctatatgtaacatgaatatctgagtcttttttaacaaacgaattttatagttatatctacatgattacataatactatctactgtttacaaatttgttacttacatggttatctatttgttgaaacttcacttcttgtaattgttttctttataatatatgttgtattcaagttgtgtttgtttgggttacttaattaatagtcatttaattaagacaaacccgatattctgataaatatcgacttttccggatgagtaatatctgcagttatggtagtaaatggtagtaaatggtagtggagtatcgggtttggcaaataaagtttactttcaaacctgataccgtttcattttatgactgataaccttgatttaatgtcgatatttcaaattggtatttaaatacaagtgaaatttccatatttagatgatatttaatagaataagaggtgtttatgagtaaacaaagatgaatggaatagtcaaatattatcaaaagacatcaaattttattgattcattaggtgttgaatcaaagggtattcatagatatttaccaaatgaaagatataatgaaaattcaattaaaccttacatatcaactttagggttatggatttcaggttgtggtggattaacttcaatgacatcatattttcttggtccattgaatttatcaattaggattaaaggatgcaatgttaattgggaattttggtacacttgttggttgtttagttgcagcttattgtgcaacaatgggtccaagatcaggtttaagacaaatgtgtagtgcaagatatttatttggtccttggatggttagagttgttagtataattacaattattgggtttttaggttggagtataactaataatgttttaggtggtgaaatacttcaatggttaagtaatggtaaagtaaatttaagtgttggtattataattgttagtataatcagtttaattgtcgcacttttcggtattgaatatgttttaaaagttgaaggtattattggtttgtttgtgttaattgttgttttgttgttatacattataccaagtggtgaatttactaaatgggaaggtttacagacaactggaagtaattctttaactaaaattggtaatagaatatcatttttcacattatcttattcagttgtttcaacttggggtggttgtgcatctgattattatattgtattcccagaaaatacttcacaaattaaattatttaattttacatttttaggtattttattaccaacaattttcggtgcaaatgttggtattttaattggtaatgcagctgttggatttgattattggaatgaaatttatgaaaatgaatcattaggtgggttattaaatgttgttttcgataaatgggggaattttgggaaattcttattagttgtattttggttatcattaattacaaataatataattggtacatattcaagtgcattttctgttcaattacttggtgatttgtgttatagatatttaagtagatggattatcgttgttattatcttcgttattacattggtttgttcattagttggtaagaatcattttagtgaaattttatcaaatttcttaccaatgcttggttattggataagtatttattttacattattaattgaagagaatttaattttcagatcaacttcattagttaaattatttaaaaaggaattatatgaagtacctgaatttgagaaaaatgacgttgatgatgaagagaatatttttccaacattaggtagcacattaacaacaaattataaagaagatgttgaaataaatgataatgaaacaagtaattcatcaatggatgataactcatcagtaccaccattttcaacagttaattcaattccttattataattttgaagcttggaatgataaatatattttaactaatggtattgctgcaacttttggattttgttgtggtgttgcaggtgcaattgttggtatgaatcaagtttattataagggaccaattgctaacttagttggagatgatggtgcagatattggtatgtttttatcaattggatttacagcaatttcttatccattagcaagatattgggaactaaaatgtttccaaaagtaggtaggtattttgtattcatattatatattattctttatatttaaactagtattatattttcatactgaaaggaataaactttaagtaaagttagactagatttgtacaaagataatatatacctctacttacataacgaataccaaagagctatactacacaacatgtatcaacatactactattccaaaccaatttgattggttataatataagctgagccaccatggtgagaaataaattttttgatgaaactgtcaggattagtaaaacaagttgtatataaatagacagttgcaatacgttcttatttgtcgtcgaggaactgttaatcatgcatctcaacaatgttaatgacaacataggttaaaagcttttattatactgatattattaatttagtacaaaagctatatgataggaaattttatagtttataaattttctaggagcttacaaacactaacaagacaatcatcaactgctgtttcttttgaaccttcacctagattatgtttacctccttcaattatcttactatatggagaccaaattccaggtttagttgcacttttgaatctgcttagtaataatgccttgtcaacataatctggagcaaattcatcacaaccaccgtataataccaataatggtttatcaaccttaccgaatgttaatttgaaatcatcatcttccaagtctgatgaaaaaaaatcatcgtcacctcttttggagaataaagaataccatctatatgcattgactggagcaccaaaaaagttaagagtatagttatatggcatcaattcatctgatttaccttcatctatgtatttcttggcaagtgcatttcctttatcaattgtttccctttccattaactcaccagcagcttctctatcggatacacttgcttgtaaaataccaaaatcaacatcaacataattttcatctctctctgctttggaaagataatacattgtgttttgacaaccagttgaatgacccattaaacctactttctttcttgatccaccatcttcggattttagaaatttgactaatttggtgatttcactatggtctctagctaatgaacctgtaccccatccaattgatgaacttgtaaattcaatttgaatcaatgaccaaccgatcttgttaagagcattggataatggaactaaatatggaactgtggcaaatctatcaccaagacctccaatgaaaatcacaactttatctgatcttaaattaccaaattcaaaagcatgttgcttgaatccgtattctaataatgtaccatcaatacccataattgagtgtttggtttgtgtcttaaagaaagttgaagtgggtgaacaagaattattctttaccattagtgtttaaatttatccgataagcgatccttcatacggcgcaaatttaagttatgccgtgggtctgagaaattatattcacctgtgaatgtctttaaattggtaaccagttaatctaacagttataatttaaagtagatagtaactgataagataatataagataaaaatagaaacaaaaagtaaaagaacaaatttaaaataccaagaatctaccccttaaaattagatccatttttcaatcgccgattgacactagtgctattttagtgctatttcaatattactccgacgatggaaatattatgatgattattgctggtttttttggtattatcttgactgataatggtacaataaaggtaactatgtatagttctataacaaaaagttgacctagtaagcctattatattatatccgacagatcatttccaaatatcgcgtagagaacatacaccatttactgatatatatccgatttactaactgcatcagataaagtccatatttgtacatgtattacgtctttcttgctattagcaaagaactcatcatcttagaaataatcaatgttaccatcatgcacattatgcaagaaaagaaagaaaagatgtgattttaatctacctagttgtaaacattgtaaatcaatgggtactcaatgtgaatattttgatgaaggattgggtaataatgttccaagagaatatcttaaaagtcttaatgataacattatcttattaagaagtgaaattgataaatataagaagaagattaataaaaggactaataatgaagaaaatcgtgaagaattagttaaatcaacttctaataatacttctgatttatatgatatgactaaaaatggtacatttcttgaaggttcagataatgaattacattattttggaccatgttcaataccttcaatggtttatatgagttcaatgatgataaaacttaattcaaataaattaaatcgatttaatatcttggaatttagatcattaccaaatttgaaaattcaattcgattatagtttaattacaagtgaacatactaagatattaatttcaaattatttaactgaaatttatccaaacttccccctattatcagaaaatttctttcattttgatttaatggttaaaaattatcctgaatggaaacaactattcatattcttaatattacttatatctgcatcacatttaatgaggaaaaaatctgattttacaattataaaattaatgttacaacaaaaagttaatgaattaatgaaatcaaagataagtaatgaagatggtgatgaattattatgtttaatattgtattcaatttatcaattacttgatcctgaaatgggtaaaactgtttggaaaacaatttcacttgcttgtgatattgctgaaaagcttaaacttaaagatataaataataattattattcattaagtggtaaagttgctagaaatgtttctaaaaagcaaatattaaaatgtttagctattttagatagtgaagtatcattattacttggtagaccacctcaactaaatttagaaaaaaatcaaatactaaatattgaaaatgatgatatatcggttaatgaattattgataatttatgataaaactgaatttttcaatgtattatattcaaattcatcaaattgtggtgttttaacattatttcaatcattaaaatatcattcaaataaaaatgttaaaatttggttactttcatcacctttattatcacataaatgtaatgattgtaatttatattatgattcagctgttattaatatattaagttcatcattaaaatatattgaagattataataatcgatcaaaaaattcaggtgttattctttattggattgaattatctcatatcacaatatctttgattaatttaatattaatttcaaaattttatagttcaagttatcaaggaattgtatctgataaaataattgataatcatttagttattggactaaatatactttcaaaattatgttcacattggtattatgcaaatacaattaaagcatatattgatcttctaatagagtctatgtagtattgtttattaaattctatatataatcacacattttatttagtaaatcattcagatcccaaaaattatcatcaataaaatgatcttgccaattggatttatcagagaataatgcatcagataatgattcatgttcatatttccccatttcctctaattgattttgattatcaaaatttaagatatcactttcattattgttattaataatattattatcactgctttgatttttatcattattaacatcaactttattatcaacaatgtcatttttcttatcatctgaaacttttgatataattttagttgggaatataagtttttcaatttttgatgaaattatattacattcatcatcatttaataaaccatcgttcttctttataacatcatttttcaaattttctaaataattgggtatattagattctttaatatcaggccatctttcactaaatttatttaataattcaatacattcccctaatttattaattaaaaattcaaatgaataaaattctttgatccaatcaatttcaaaccataaaacatctaataaatttattgcagcttcaacaatataatgaacacccatcaataaataagaaacttgagcagattttgcatcattaagatattcatcaacatgaattaaaacagctttaattaattttaagaaagattcatgagaaggatttgggattcttggagttcttcttctgagtctaatttgtaatgaagctttacaaattaatctaaatctaagttgattaactttagcaaattcttctgccgttataaaccaattttcaactttttcttccattgaatcaatccaatcatttatattaacattaatttctttatcataccataaaacatcacaaacttcactttcacataatctaaaactataaaaatgtaaagcagcagcctttgtttgaggacctgaataatcaatacctttttcagttataaatgaatcatccacaattgttggatattcaacagatattaaattttgatgaattgggaatttaattctcaaaactgctgataaatgtcttaacataccactacaaacaagaaataatcttcttctatcatcaacatctaaaactgtaataacttcagaagtaacttctttatgtaatcccatatcaatacataatcttaaagcatcacgtaatgtatgccaaatatctgcagcaaatggatttgcaaatgaataatgtgcaataagaagggttaattgtaatttttgcattttactttcccaagaagtttcaaaaattgttgaaatagttgcagagaataaagcacttgatgatgataatgcacgtttttcacttctatttgtaattaaagcagctgaaattgccattgtaattgaaataactgctttttcaaatgatgatgcaatttcaggtttatttaaaacagtttctaacatttcagttaacattggtcttgaaataattggatattgaggtaaatggaaatccatatagttggacatcattattttaacaacatttttaggaattgttaataaatcgacaggtggatgattttcaataaaatgtttcattttacctctcttggaaccttcaatcatattatcgaaaggtgcaggtaaattacatgaattaaagtaaagaaatgaaaatgattgaattgttgattcattctctgaattaatgaaactttgtaataaaggtgttgaaacatatttagttattgtataactctcctcttctgcattattaataacatgatgatttttcaatttatctaattcaatctctaaatttgcaactttatcctctaaataaagaggtatacttctaggtattggtttatttaatcctctaacccaagcattacattcgatattttcctttaaacatgaatcacatttggggaattgataattacatggtaatcgtttatgtttacatctataacatttagttgatgatctacgatgtgtactctgttctagtattttaatttcctctggtgaaaatagttcatccatttgaagtaagtagcatatattctgtttgttaataggatctgatacgtgttgatcagtatggtcattatgaaaccgtattgtcttaccttccttaacttcttcatgttgttgttgatcaaccgttttctcagataaggttacgtaaggtttcttgatactgataacggtagcatgtttcatttcatttggtggtagtttgaaaggttttagagtagagttgttcaaggaatgagatagttagtatctttattgtatttaaagagtactttttgtatcatcatatcgtatataagtgtgataactatcagtagaacgataagagaaggtactgtggtaaatgcgacagaggtagatgatacatcgctgataagacaataatgaagtattgcgacagtaagtatactttgcaagtggaaatgaagtggaaataggtggtatcttagtggttgacagtggtagtacataagtaagtgtatctgctgttgtgtgatgggaggtataggttttacttcaatatccaatgagtatagacaaaatggaaaagttattgaatgttgaacttgtaccaacatcaaagttaaaactggtttaaccttatcattatttgtcattattggtattatcatttggctctatgattttaccattaaacctgttcaaccaaagattgaaggtattcctgaaattaagggtaattccattatttatggtattctggaaaacttagcagatgatcatccaactaatttagagagattatcgaaagaacataatttacctgttttccaatgtttaatgggtacacaaagaattgtttttattaattcatatgaatctgctatggaatggtttattaaaaatcaaagttcattaattgatagaccattattttatacatttcataaattagtttcaacttctcaaggtttaacgattggtacatcaccatgggatgaaacatgtaaaaagagaagacttaatgttcaaaggtatatgacaacacctgcaattagagagagatccaatttaattgatttagagggttattcattactaaaagatttatttagagattctcagaatgaattcatttatccttataaatatactcaaagattagcacttaatttcacaacaatgttaagttatgcaactagatttaatgatattaaaacaccattattacaagaaattttagatattgttaaaattatttcatcatttcgttcaactaataataatattcaagattttgtaccatttgttagattattacctgaaaatgatagaaaaagagaagctgttaaagcaggtaaaactagggatatttggttagataaattaacaaggaaagcaattaatcataaggatgaacgtaaaagtattgttggagattttgccaatgctgaaattgacagtaatggtattaagaatagtagattaaatttagaagatattaaaagtatttgtgttgggttagttagtggaggatttgaaacaattggatcaactgcaagtttaattttcatgcaattagttaatgaacaaggacatgaatggcaagagagagtatataatgaattaattaatcaatatggtgatattgaaactgcatatgataaagttttattagaggagaaatgtgaattttcaatttcatttattagagaattattaagaatgtatgcagttataccattaattccagccagaaaaacatctaaggaattccaatataatggatatactattccacaaggtattacagttatattaaatgcacaagctgcaaatcatgataaacaacaatttggtgaaacagttgatgaatttaaacctgatagatttattggaaattcacatatcaacacaccaccatatcattttacatttggtgcaggttcaagagcatgtactgcaattaatttatctaatagaattttatatgttattttaacgagaacttgtttgcttttcaaggtaatgggggatcctaatcgtaaaccaaatgttgattatataaattatgcagatgatagaagtgcacaaacatattggccaaaatattttggtatgaaacttattgcaagggatgaaaatatggttaataaatgtttaaataagtcttatgagcattgtaaagaggagatggggtattccattgagtgtaattagtagtataatgctgtgtataacctgaataagctgaatataatagctgctatgcaaatagagtaatagataagataagatacttattacgtaaacaatgctcatcccgttttcagagccattgcaataaggtgatattgaggtctttattattattatgttgtttcttctgtttcttttgagtttgttgctttggcactgttgctgagtagtatagttgtcctcctctctgtagttgtagtagtgataatagtatataatatatcttttttaaaaaataaataaataacacacaatacacaatgggatttatcaaatttagattaaatgatccaaataaatcatattcaaatgttaatgttgcaggtaatttcaataattggaattcaacattagataaattaaattttaatgattcaaataaatcttggattttaaatatgctaactgattcacctacaaatactaaaattatttataaatatgtagttgataataatatttggatttgtgataatgaaaatgcagtggaattagatgataaaggtaatgaaaataatattatttatgttattgaagaggaggaggaggaagaaaaaagaatgatgataatgacatcaatgatatcactccggtggctcaattgactaaaccaattgataatcaagtaaatgataaaccacttgaagaagaaaacttatttgaaccacatgaatctcaattaagtgaaacagctccaacgagtggtgatgaagaaattgttcctaatacagatatacttactacaactaataaacataatgatgtacaagacatcattaataatatccataataataataataataataataatcaaaatacccatggtaataataatcctgaacatgccattcaatcaatttgggaaactgttagatggttcttcagatactatatcttatcatggttcttacctgataaatgagtagccgttactctcattccattgcattgcatttacatcttatgataatgtttctttttctttctagcttaaatacaaagaattatataatatgaatacaaaatacctaccctacctacttttggaaacattttaattcccaatatcttgctaatggataagaaattgctgtaaatccaattgataaaaacataccaatatctgcaccatcatcaccaattaattttgcaattggcccactataataaacttgattcataccaacaattgcacctgcaacaccacaacaaaatccaaaagttgcagcaataccattagttaaaatatatttatcattccaagcttcaaaattataataaggaattgaattaaccgttgaaaatggcggtattgatgaattattattattattatctattgatgaattacttgtttcattatcatttatttcaacatcttctttataatttgttgttaatgtgctacctaatgttggtaatatattctcttcatcatcaacttcatttttcttcaaattcaggtacttcatataattcctttttaaataatttaactaatgaagttgatctgaaaattaaattctcttcaattaataatgtaaaataaatacttatccaataaccaagcattggtaagaaatttgataaaatttcactaaaatgattcttaccaactaatgaacaaaccaatgtaataacgaaaattataacaacaataatccatctactcaaatatctataacataaatcatcaagtaattgaacagataatgcacttgaatatgtgttaataatattatttgtaattaatgataaccaaaatacaactaataagaatttcccaaaattcccccatttatcgaaaacaacatttaataacccacctaatgattcattttcataaatttcattccaataatcgaatccaacagctgcattaccaattaaaataccaacatttgcaccaaaaagtgttggtaataaaatacctaaaaatgtaaaattaaataatttaatttgtgaaatattttctgggaatacaatataataatcagatgcacaaccaccccaagttgaaacaactgaataagataatgtgaaaaatgatatcctattaccaattttagtcaatgaattacttccagttgtctgtaaaccttcccatttagtgaattcaccacttgatataatatataacaataaaacaacaattaatacaaacacaccaataataccttcaaattttaaaacatattcaataccgaaaagtgcaacaattaaactaattatactaacaattataataccaacacttaaatttaatttaccgttacttaaccatttaattatttcaccacctaaaacattattagttatactccaacctaaaaatccaataattgtaattaaactaacaactctaaccatccaaggaccaaataagtatcttgcactacacatttgtcttaaacctgatcttggacccatcgttgcacaataagctgcaactaaacaaccaacaagtgtaccaaaattcccaattaacattgcatcctttaatcctaattgataaatcaatggaccaatgaaaaatgatgacattgaagttaatccaccacaacctgaaatccataaccctaaagttgatatataaggtttaactgaattttcattatatctttcatttggtaaatatctatgaataccctttgattcaacacctaatgaatcaataaaatttgatgtcttttgataatatttgactatgccattcatctttgtttactcataaacacctattattctattaaatatcatctaaatatggaaatatcacttgtatttaaataccaatttgaaatatcgacattgaatcatctttatcagtcataagataaccggtatcgggtttgaaagtgaaaaaattttgccaaacccgatactccactgataatttacttatttagagcggatattacctaatggggaaagtcgatattggtcagaatatcgggtttgtcttaattaaataaaattaaataaaatatcaatactaatactacataatattactttgagagttttgtaagataatacccaatggttggtatttgactttggattcatcaatgtaatcgtcttcatcgtcctcctcttcatcatcttcatcttcatattctgaacctttgttggtatttgtagtatatccgttattgaatatatcattaacattactagtattattattatatggataatgatgattattattattattattattgttgagattcatattctcaataccattaattaagtcatcattatgtggattcctattattattattattattattagatatttgatattgtcttggtgtattaccacatctatccttaccaaaattaattttacatctttgataatcaaaattatttctaataccatcaattgctttaattgcatttgaaatatttgtaaaattaacaaaacaacaatgtctctcttcaaaaaaattaatttgttcaatttctccaaattctttaaaatctaaatataatttatctttattaaatttaatatcagaaattttatctaatcctccaatataaatgtttcttgatgctccattaccaactgctaaattaattaaatttggtaatggacctgaatgtttaccccatccaactttaattttcctattatgaataattaatccatgtaatgatgacattgcataaaattgtgctgctgaaattggatcaataaatgttataaaacaaacatgtctatcattaattaatctaatattttgtaatataccacctctaacaacattacaaatttcttcaattgttgaatctggatgcaaattacctaaataaattgttctattacctaagtttgaattaccaccagttgatgttgcaatcattgcagctgcatttgattgttgaactaatgcattagaaattaaatctctatcaacttgattaagaaaattatcaacatttggatttaatcctaaatattgtgctgcattatgttgttgagttttagttataaatgcacatctatctttaccataaaaaattctattatctttatatttattatttaatggtaatgattgaacacatttaattgctgataaaatacttgtaaaatgaataaatgcaattcttttctcatataaaattttaattgtatcaatttcaccaaattcttggaaatcatttcttaaatcatcttcattaatattatcatttaaattaccaatataaacatttctagttgcattatatctttgaacacatgataaaactgctggttgaacaggacttggtttaccccaaccaattttaatatcatgattattaattgttaatcttttcaaaattgcatcagaatgaaataaagttgcagatttttcatctaaaaatgaaataaatgcacaatttttagatggaatcaattttaatgattcaacagtacctgatctaacatgatttaataattcattagttgtaataccatttggtatattacctaaataaacagttcttgaaggaattgatgaaacttcaggaattaaattataagtactattattatttgaattagaatttgatgttaaattaaaagatgtattaataaaagtattattgttgtctaaattattattattattattatttaaatctggtgaatttaaatcatttaaaccaatttgagaattaatacttaattgaggagtcattgaaactgatgaaggtaataaatttttattttgtaataaagtattattagcagatgattgatttaacattgggattgaattttgagttaatgttgaaagtggagttgaagaagagaattgatttaaaaattgtggggattttaaatttgaatttaataaactatattgagaattattattattgttattattattataaagatcaaaattacttgcagaatttgaagtttgcattggaatattattataaatatttgaatttgggaaaggatttccgttaggatgagagttgatattgttattattgttgttattattattattattgatattctctaaatcatttaaactcatagtagaatgattaatttgttgaggtaaaagatgattaaaatttgacatagttgtgaacttttatgttatttattgaaagcaaagcagaaattatgatatgtataagccttttataatggaaaatagaatgtacaagagaaaatgtttattgatatgtagttaagtaattattgaactgaaattgaaattgaaaattaaattaaattaaaataaaataaaccttaagaagtgaaatttaatgattaattattgaaatgaaatattgaaatgaaatattgaaatgtaaatgtaaatgtaaatgaaactaagctaagctaagaaggggatgataataggaacttttaatgaactgaaatgaaaacaaagaaatgtaaatgtaaatgtaaatgaaatgaattaaattgaattgaaatgaattgaattgaaaatgtgtataattccgatggcaaaatcagaatataaaatttaaaaatttagaaaatttagaaagtttagaaaaaagatactataatatactatattgaatggtatatagttaagtataagaaagcaaatagaatggagatataagctttatcccaatataacaatataatatatcagagttgtttaaaagaaacaagtgataaaagaatgaaagaaatgaaaagtgttgaaaaatattgaaaaggtcccctttttctctctctcggaattttaaagagaatactctatttaattttgcgaggatatttttttgtaccatttggtgaacatgaatgttttattatcagaatatcagaatattatactgaatgtatcagaatattatactggataagtattattgacatatccaatgaactctaatactggttataatatccctcgtgatatctcagatcaatctgatatactttcttataataatagtaataataataatcaaattaatattaataataatagtatgggtatgaatatgaataataatatcaatatgaataataatatgaataatatcaataataatatgggtatgaatatcaatatgaacaacaataatatgaataatatgaataatataaacataccaattaatactattaataataatccatcaatgattaattcacctattactccatcatcttcaaataatttagattcttcaggttggaaccctgcttatgttcaatctttattaagaaaaattcaacctggtcctggtataacaaaacaacaaagatttcaacaattattacgtagtggtgaattaactcgttctgatgttcaaattttacaaaggcatcaacaaatgattagacaagctcaagttgttagacaaaatcaattacaacaaagagcaattcaacaacaacatcaaaatcaagtacgtgataatatatctaataataatagtaacaatagtaataacatgaattacaataataacatgataaataaccaacatattaataatagaagaattaatcctcaaatagctgggaaatctctgcctggaaagtctctacctggaaagtctctacctggtaaatcactggctggtaaatctctaccaggtaaatctcttcctggtaaatcactggctggaaaatcattaccaggtaaatcaatccctggtaaatcactaccatcaaataattcatcatctacatctttaaatatgtcaattaataataatttaccaataaatatatcatcaccattatcacataattataatcaaaatttaaattctccatctaatcatcaaaattattcaaatatttcagttaattcatcattagaaaattcagttaatttatctaaaaatattccaattaataataataataatattaattattcaataaattctcaaattaatacttcaaataatacaccaaatttatcaaatatacctgtaaatttacctgttaatatacctgttaatgctcctgttaatgcacctattaatgctcctattaatgctcctatcaatgcacctgtcaatccccctgttaatataattgttaatgcacctataaatcctcttgttaacgtaaataaaccttcattatcatcaacacaattaaatgatttccaaattcaacaattaaaacaacaagaacaaaaaaaattattattacaaaagcaacaacaacaacaacaacaaaaattatttggtttaacaaatgaacaatatgaaaaattatcaattcaacaaaaacatttattaaaaatacaatatttaaggaaaaaggctaaaactcaaagattttatgaatctgatgatgaattattgaaaaaatttgaaaattgtaaaccttcaatggatttccatattcataatgatcattatagatttggtcatagtgataatttaataccgaaaacagatcctgctataaaagatttccttaaatatgttgctaaaaagaaaattcctgatgctttaatagaaattattaatgatggtaatatacctctatatgatggtaatataatattacgtgtttttgatcatagaagttcaaataaattattaaataataataacaataacagtaaagatattaatgataaagataccaatgacaaaaccaaccctactaatactaatttggaaaacccaaataaggatgttaatgaaaatgctaaaactactatacctggacaatcaactgaacccacaaccaaaaaatataaagaatatagaactattttaagattaacacaatctgcattatatgaagatttctgtgttacaacagatactcaaatgtttggagattcatttgttttaacttatgaaagtgaaattttaactgcttcaaatagaagtattaatttacaaccaatttcaaatccttatttaaaggataaatcattatggccagaattagaaatgattaaacctaaatatgatgaagaaaatgatgaaatgattcatttacatcgtacagatatgagagaattaatagattttaatgatacatttaataaaaagaaaaacaatagtagtggtatattagcaacattcaataaatctgttaaattaactaataagaaaaaatccattgattatgaaaatatgaattataaaccattacatattgataatttacaatcaaattcaaaatatgaaaaattaatgcttataatgtcacaatcattacctcatagtaatttagattctaataaacaaattgttgaattaccaagatttgaaagattaagatttattgaaaatttaagaaataataatttattaaataaagatgaaaatttaagaaatttatcaagttcacaaaataaacaaaatggtggttattcaagttttagttcattaatgaatggatttagtaataaatcttttggatcaattcaaaataaaatgaatattaataataatggtactataaataatagtaatatgaataatactggtaataattttatgaataatggtaataataatattaatactggtacaattaataataacaataccaataatactaacactcctaatggtaatggatttaataatgatgaaaacggtaatacaaatggtaagaatgctaaaggtaaaggtgccaaaggtaagggtaaagcaactacaactggtaagaagaaagttgaaaaaccaaagaaaccaagaaaacctacaaagaaacaacttgcagctcaagctgctgctgcagctgcagctgcatcaaatggtggattaccagtacctgaaccgacagaacctgttgttaagaaaaaacgtgctccaaataaaaagaaaaatccaactgcatagtaatccttactttataaactttatataaaacttattcaagtttatcaatacaatacattaaaagttgatataaataatctctatccttttcatcaaatatccaaaatccgaatgcattaccttcaaaatctctaattataatcaattcatcacttttttcaatgagtaaattacgttcattgattatttcatcattatttaaatatttatcacctaaaagtcctaaactaaaattttcaggttgactacgatttaataccattaatccaaatttataatattcaccatttttactattaattattttattaacattaattttttcagtttccttaatatctgcattaatatcaaatttatcccaataacttcgacgtgaataaattgtaattggtcccatatatgaacttttaacccaatcttctgattcttcatcatattgatatatcacacaatatgatgaaatatgtaataattgtgtaattgctgtatcatatttagcaataacattaaatgttaatgcttgtttataaatttcaatagtttgttgtgatgttgcattattagaacctgcactggatgcttcactgttggttatctcagtgtctatactgttttcatatacgtcagtcattgtctgtgttttatatctcaagttaaaaagaagatacattcatgcccacaataaataattgaaaatacgatatattttctcgagattcatgttgtctattttactacatgttatattactatttttaccatattttattgtttcattacattataaaaagcagtgttcattcaccatatattctatatactatatacacgtacaagatacatttcactcaatcatttattgtctttatcctttttctcttcttccttaatcttatcaaattctgccttccaaatagtattaccctcttctttagtaacatcttggaataaaacatcgaaaacatcttgataccaatcagctggaactggtatcataccttctttaatattatctggtaattctttccaatcagattcattacccttagggaaaattattgttttaacacctgctctctttgctgcaattgtcttctcctttaatcctccaattcttaatactttacctgtaagtgtaatttcacctgtcattgcaacatcaggttttaaagatttatttaatgctaatgaaaggaatgatgatgtaattgtaatacctgctgatggtccatcctttggtgttgctccttcaggacaatgaagatgaatttgtgccttatcgaaaaatttattatctggataatgtttggcaaggaacatcttagagaatgaatatgcaattcttacagattctttcataacatcacctaattgcccagttctctctaattttgcatgagaatcctttgtaattgcatgctctaaaatagattcaatatataatgctgaacctcccattgatgtccatgcaagacccataacaacaccaggtactgtggtttcatataatctatcagctgtgtaaactggaacaccaacaaaatcttttaagttatctgatgatataactgctttataatcatcaggtataacaatttgtggtaatttttcttcaggtttagtttcaacaacagattcttcaccttcagttttggtttcttcactttttgttgtttctgatggtttttcatttaatttatctaaaactgaaccttcttcaactttattttccttcaatttattttcagttgatacatcaactgctgcaccatcaggtaaaattgattccttctcttcttgaataatttcatcaatttcttcttcaccaatactttcaactgcatttaatgctgcctttctataaattttatcaatttttttctttaaatttctaacaccactctctctacaataattcttaattaatgccttgattgcttcttcagttaattcaacattaacattttctaaacctgcattcttctttgcttcaggtgctaaatatttttctgcaattttaattttttcatcttcaatataaccagaaatttcaataacttccatacgatctaataatggaccaggaattgtacttaatgtatttgcggtacaaacaaataaaacttttgatagatcaattggtatatccatataattatctaaaaatgtaccattttgttcaggatctaataattctaataatgcagctgatggatcacctccattaacactatgagaatgagagattttatcaatttcatcaattaaaattaatggattttcagtttgagttttctttaatgcttgaacaactctacctggaattgcaccaacataagttcttctatgacctttaatttctgcaacatcacttaaaccaccaactgaaaatctataaaattctctatttaatgaatttgcaattgatttaccaattgaagtcttaccaacaccgggtggaccaacaaaacaaataattttaccgttaattttatttaataatttaccaactgcaataaattcaacaattctatctttaacatcttttaaaccataatggtcttcatctaaaacttttttagctcttttaatgttataattatcaacagattgtttaccccatggaatttgtgttaaccaatctaaataatttctagtaacagtaaattcagacataacagtttctaaagtttgtaatttattaatttcttcatcataaattttctttacttcttcaggcatgttcaaatttttaactctttcattatattttgcaattaatttatctctaccatcatcaatacctaattcctttttaatccattttaattgttcatttaaatgatattctctatgtcttttagccattctttcttcaatatctttttcaattttcttttgcatttccttattcattaattctttcttaagaacagttaatgccatttctaacctttcagcaatattagtacattcaagaattttttgtaaatcttcttgattaccagcagttacagcagcggcaaaatcggctaatttttcaggacaattaaagatatcactatgtaatgaagcactgaaagttgctaattgatcactgaaagatttattaactagtgacatttcttttaaaacatctaaaattgaggaagttaatgaagaaataactggatcatttttaacaaaagcttcatcttcaacatttgaaacattggctaaagtaatttgatattttttcaaaaattcagttggattaacttgttcttcttcaatttcttcttcaataatttcatctgcatcaactttatctgcaattttattttcaattataatttcttctacatgtgaagtggttctaattggttcatcaccttctttttcacctgtaataccttcaataatttctttatcagaaacagaaggttcaatttcagaatgtgcattaatttcaacatcattaactgcttctttagaaggtgggaaaatttcatcaattctaattcttttatgaggatataaaacggttgttaaagtttcaacacctgtatctttatcctttgtataaacatttgaagtaatttgagctaaaacaccagtttcgaaaacttgatcttttgattcaattatatcactttccatattttcatctttgaaaaggaaacaaccaataaatggatattttctatctaatgattctttaatagcttttataacattaacatctgaaattataactgctttataaaaacctgggaataatggacgtctagaaattggtaatgcaactatttgtgggtaaacttcaggtaattcaatagctgttgaatttttaatacttttagaatcatcatctttaccatcatcagatggtggttttgaaccagaatttgatcctgcagctcctgaagcggcagttgaggaaccagtagatgtagatgatgttgatattttagaatctgatttatctgatttttcaatatctttatcctttttatccttacctttatctgattttggttttgatttatcatttgatttatcggatttatcagatttttctgcattattagacttaggtgaatctttctttaaaaattgtaattcttgattattaaaattccataaatctgttgtctttaaatgatttaaatgattataattatgtttattaatttgaatattttcaaattcactaacatttgaagcaaatcttttacaatttatattattaataacattaatatttaaatttatacttttattaatccatttggaacgtaaaattgtacgtgtagctgtacgtttagaaacacccttagcgtgtccaaacattatttgattaaattcagtagaaaaatgaagaaaagtgatagttcatttagaaaatccactagattcagtggcaaaattgtgtacttcatttcaattattcatgatgagccaggtgttacttgaagaaaggcaaaaaagacatcgtcccatcgacttgtattacgtaatatatttttttatctttatgttgtcgttaatataaataaataaggtaaagtaactataacttagtaactataatatcattaaaactatataaattaagcctttggaccaatcatattttctggtctaacccattcattgaattgttcttcagttaaataacctaattctaatgctgatttctttaaagttaaacctttcttatgagcattctttgcaatctttgatgccttatcataaccaatatgtggattaagagcagtaactaacataagtgattcatgtaataatttatcaattttatcagtatttgcgataataccatcaacacaatgaattctaaatgaatttgaagcatctgctaataatctaacagatgataataagttagaaattaaaactggtttgaaaacatttaattcaaattgacctgatgcacctgcaaatgtaatacatgaatgattaccgaaaacttgagtacaaaccatagttaaagcttcattttgagttggattaactttacctggcataattgaagaacctggttcattttctggtaatgctaattcaccataaccacatcttggacctgaacctaagtatctaatatcttgaccaattttaaataatgaagcagcaacggtattaagagcacctgacatttcaacaattgcatcatgagctgctaaagcttcaaatttatttggtgcagtataaaattgtaaaccagttaaattagtaacttcttcagcaattttttctgggaatccaactttagtgttaagaccagtaccaactgcagtaccaccttgagctaagaatcttaaatgttctaaagcaatttcaattctcttaataccattagtacattgttgaacataaccagaaaattcttgacctaaagttaaaggagttgcatcttgtaaatgagttctaccaattttaattatatctttaaattcatctgctttattttgtaaagaatctcttaaagcagataattcaggtaataaatgagttgaaatttcagtaactgcagcaatatgcataacagttgggaaagtatcatttgaagattgtgacatattaacatgatcatttggatgaacaggagttttagaacctaattcaccacctaaaatttcaattgctctatttgagataacttcatttgcattcatatttgattgagtaccagaaccagtttggaaaacaactaatgggaaatgatccattaatttaccttcataaacttcagttgcagcttgttgaattgcatctgaaagttttggatctaaagcacctaattcagtattaacttttgcagctgctttctttaaaataccgaaagacttaataacaggttcaggcataacttctcttttaccaccaattttaaaattttgtaaagatctttgagtttgagcaccccaatatttttcatcagggacttgaatatcaccaaaggcatctttttcagttctcattgcaattgaagttgttgagaatgacatttttgataaaattgattttgcgtttaaagcagatttagctgatcttgataacatttgaaaagaacaaataaaagggggaataatatattttaaaggaaaaactggattataaggaaatagtgaatataataataaatgttagtatttaaaattcataatagctggaagatgatattaagatggagtcataatatgagtatagtaatttagcggagattaatttaattaattttcgaataattgaaaaataacttgttaaataacggagaaaaaacaatcaacgaagtgaaatggataaatggcacatcaattagtgggattatgtaatgcgctaatatcctgatttatcgtagaatgtcgggaatgtcgggaatgtcggggattctttaaaaaaataaaatctccgggatctttcttatgtggtgtacaggtctcggaattttcattttcattttcatttcactcgcaattttagtgatttttagtaattttcatattctcatatttcaagatttacaattaacaagttgacaattgggggggtgtgaatgctgtgtttaaaatcaattgacaacataatgttaattattactatactatatgatccatggataatcagttaactgcaaattgtaataatgttaatacatacgatatactaatataacttgttacagaaagaataaagcaatataaaagataaaataaagataaggtacatgaacctaacaagctcaatatattaagtataaggtactaatgactttattttttgacaagccttcaatccgagtgagaatttgaatgatttcaatttcccgtgtcggattatccaatgataatttatttttctatatatgtattacgtaatatagtcgcgtctgtgtttatagtcacgtgatatatttcgcttatgtaatcatttacataagatctatctattctaccctatataacatactcatcatcatttgctaccacttataccatcattaccttcatcgtacatcatttactacctctttaacatcttcaaatacttcctctaattcaacattatatcctcctttacgatattgatctaatactgcaactggtgatttcatttcattataatcatcttcttcatctcttaatcccttcttctaataaataaatacctctaccacttctcttaattaacatcttaattgatccaatatctccaaatctatcctcaactttaaaatattttttaaataattttttcctatcatttgaatccttcaaatttttctaaactcatttccataattttcttaaaattagtcatatctttaattaatactaaaaaatctaaatatgaacaaataaatctaatattattattaaaatattgcataccaattgaatatgccctcttactaatacctaattcattcttataatattcaatcattgaatattctttaaatatattccattcaattcctttaaaatttctactcattttaaatattattctaacttctttaatatcacctattctattaataattttcattaatctacaataacaatatgttattatctcatttttattttggaaactatcttcatcctcttcaatattcttaatcaatttaatccaaatttctttaattttctcaatatcaccctttatctcatattcattactaacttcatttgttaaaattaaactcattggattaacttttaatccatcatttaaaatttcattacttttatcaatatcttcctcatttttcaaatattcataataattataccaaatttcaggtattatattacaatattgaatacttaaattataaacataattaattctcttctttaattcaacttcatttttattcattaaattttttttctcccattcaatccatttattccatctacgaatttgtctaatactatatttcctatcttttaatttacttatacttttagtaatttccatcaattcatcattaatttcctttaattttaaatattctttaatattttcattaattattttccttgattgatttaaatctaaatcttcctcaaatttaacaaatattttccaattatcctctaatttaatacttggataactaatcatcttctttaatgatgatctaattaattccattttagttttctcttcattaggtgtaacaggttgccaaatatataaatatcttaaataatctgaccaaatattataactttcaaaaaaatcttgtccaacaatttcaatagaaaattgatatgcctttaaaacaatatttcttgcattttctgcattaccagctgtaattggattaactttttcaacatattttaaatataatctccataattcaacattataaatttttgttaatattttaaaaaatgaactctcaatacgtttcttatctaatttatctccatctacttccttattcatcatccattcgatatacattgtccatttatctccatcagttgacatattgtgataaataagtatcaaataatttagttattttattttcattaccttcaataactgcagttgttaatacactattccattctccatatgtgtaatttgtcttaatctcttcctccttctctttgatctcttccttaacttcttcaacttcttcactcttcactctcttaatatcttccctcttaagaccatcctctgcttctcgtttatcaactgacattttctttaccaaaaagaaaaagaatcacaagaaaagaacctaagataatttctcgacatgtcaaattaacataacatgtaatttgaacaccggtttctttttctttaagcaagatgatgaatatttacacttggggtaatggtaaagagatatctccctttgacatagaatctataatactatcacaattaattaatgatattgatgatattaaaataataccaaattccaattattttatatcaaattcacaaaaactaccatgtttaataactaatgatgaacaaataactggattaattaatatttggaattatttatcacctaatgataacaatgattccactgaaagattattatttgattcattattacatagtattattaaaaactttaatattataactacatacaattattttgttaatacaactaattatgaatcatttacacgtccagcatttaaaaattacttaccttggccatttcaatatttaccaccattacaaatacgtgaaaatgggattgaaaattgtatgagtttaggtataattgatggagaaaatgatgggaattcaacattagatgatgaagagaaacatttagttgaaactcctgttataaatgatttacagaaaaatcaaattgataataatttacaattaattaataaaaaaaaatcaattattgctaatcttaattgtattaagctacttaaatcaacaattgataattttaatcaacttgaagaaaaattatcaacttctaatagtgaatttttatcattaattatcaattcatatcttcaaaataatattattgatgaattatcagataatttcataaaaataatccttgaaagagattatcctgaatacctcaacactaaatcattaccaaagtcatacaatccatctcatttaacattttccaatgcttttaaatcattcatctcatcctttatatagtatggctattacacttattaatcactaaaatttttaacacctttatgtacataataaaacaaaatactaccatcagtatcaattatccccattaatatcttctctaattctataccttgattactttcaattttcttaaacaatttatccatattttcaactgtaactttgtgtgttttatttatagctagtacgtattgcctttacattatttggattttcaccatgaagtatatacgttatggtatgatttgaattctgtagttcaattgtagttatattcttccattgattggaatatataaggtgtaatctcaccttattagctatccctagattgttcattgtcatatagaagaaaatgtttatagattggatccgttctcagtgttgaaatttttctatccttaagttactttactttactttactttaataatttaattttaattaactgttataatatatataatctacttacaatatataaagtacttaaacaacgtagtaactttcacttgatgcattgttgtaaatatcatatggtaatgaatcatcagtttcagtactaataacatcttcaataaatacttgaatattatcatttgcacttgaatcttcaatttttttactttcattaaatgaaatttccattgggaataatgcttcctcatcatcaacatctttacataaaatttcaaatgaacctgttgaattttctaataaattagttaatttaatattaataccatcatcagtaaattgtaaattaacattatcattttcactattttcaatacttgcattaataattggtataattaaattaatttcatcaacatttttatcattattacattcatattcaaatgttaaagaaattctaccattattatcattattaacccatgttgttaaaataattggtaataattttaatccattatcaaaatttttcaaattactcttccatcttaaaacacctaaattttgatcattacttggaaatggtttacttggatcctttaatccaataattgattgagaattaaataattgtttatcaacatttggatgagttttatattgagttgaaatatcattattagaatttaataataatttaactttagcaagtgataaatttgaatcattaattctaatttgtaaatctccctttacttcagctgatgttattgtaccttcccttgtaatttgtgctgaatatttctcatttaatgtaagtaaaataccattattttcaatttgtggtttattagaagatttaggtatatgttggttattttgactttgttgttgttgttgtatatgactatttgatgaatctaattcaacatttcgttgtctttgagaatttgttggattaattaataatggttgattatcaccaaatgcagattgttgctttttacctaattgcataccacctctcttagattgtgataaaagtgattgctttggttgatattcattttgttgataatattgttcttgttgttgttgttgaatagatgatgatggttgaaattcttcaactggtgtattaaatatagattgagcatattgaccattgttattagacatttgatttttcttcatcatttcctttaaattgtaattcaactgctttctttttacttgcctctgcagcctctaattctttatttctttcaataatttcttgaattctttcctcatgagaatccatttctaagaaattaataatttgacttgaagttaaattttctttataacctaaacaaataatttcatcaaatgcacttaatagatcaaaacaattttcaaaaatttccttttcatcaacatgtcttaaaattgatgtaattgattgagtaaataaatgtaatgtatcaatatcttgtaaaatattactatgtttattagtaattaaaacaacataaaattcttctaatggttgaaacatatatctaacaaattcatcctcaactgaagtatgttgtgattgattactctctgcaagtaatgaagggaaatttaataataatgaagtaaccctttccttagtcaattccttaaattgtcttgaaataattggtttaccaccatgtgtacaaatagatgctgccaatactgccattgttaagtattaattgcagtagtttccagtaaaagtcccaaatcaaaagcagttgctgatcgtatacaattggatccaaaacaattaaatgagttgtccacatgagaaatttcaagtgaggcaaaaagggccgtcgcgtcgaatattagagattttttattattcctctgggaacatcaaattttcataatttccatgataatttgaccttgaaatagatcttccgttagttggcaaagcagatcagaccaaggatgaaaacagattactatatattgttaggaattgaggaaactgctacatctttggaaattaaaaaagcttacagaaagaaagcattaattttacatcctgataaaaatcctgatgatatagaaaatacaacaagacttttcaatgaagttagagttgcatatgaaacattaagtgatccacaggagagatcatggtatgattctcataagtttcaaatattaagagaagatggtgatcaaaatagtaattcaaataatgataattttgatgatgaaaattttgaaacttattattcaggtattcaagttgatgatattgaaaaatatttaaatattaacctttatcaaaaatttgatgattcaattaatggattttatagtattgttagtgtattattagatagaattgcatctgaggaagtcacatctggtaaacaacaaaaattaccaggttttaataattttaaagatgatacaccatttgcaactgtttgtgatccaaaagaattattattcccaagaattggtaattcaaaatcaaattttgaatcaactagaatgttttataaagtttggtcaaatttccaatctgttaaaacttttagttggtgtgatgaatatagatattcaatggcacctgatagaagaactagaagaataatggaaaaggagaataaaaaattaagagatcaatcaaagaaaattttcaatgaaacagttagaaaattcattaattttattaaaaaaatggatagtagaattgactcaaaggcaagaaaagcttatgaaaagaataaacttaatcaacaaagagaggaaatgaaacgacaggcacaaattgagaaagaagagagacaaagacagagacaattatttgaggaacaagattggcaaactgttgatccagatgatttggcagaaattgaggaacaattggataaattatataaagaggaacaaaggattaatggtgaagaatctgataatgaattagataataatgatgatttatttgaatgtgttatttgtgataaagtatttaaaagtgagaaacaatttgaagatcatgaaagatcaaagaaacatttgaaattattaaaacaattacaatgggaaatgaggaaagaaggtattgaacttggaattgataatgataattatataaaggagacaatagatgatggggatgatttagatgatttagatgatgaatttgaagatgcgttagaatcattcggtgatttggatgatcttacaaatgaacaattagaagcaatgtttgcagagcaattaatgcaagaacaattgatgaaagagaaagaagataatattgattttaatgatgaaataccagccgatgtgaaagatgaagttattgatgatgatattaaagaagaaactgttgatagtataaatgatgaaattgatgataacatagatgatgatatctatgaagacgatataaaacctaacaaatctaccgaaccatcaaagaaaaataaaactgatgaaaaacttgatgaattatctaaattactaaatggtgcaagtttagattctgagagtgatgatgattgggggacatctaaaaagccaactaaattaaagaaatctaaaataaagacaaatactaaaactaatacggaaaagtcaagtaagaataaagaattatgttctgtatgtaaagaagagtttactagtagaaataaactatttcaacatgttgaatcaactggacatgctgcaccaccttcaaaagttaagaaaagtaagaaaaaatcaaaaaaataatgtattattaagttaaattagatagtttactggaaacagcgggaaaattttatagatatgtgtttaagcttacttttagaattaaaaataaatggttagagataatatatcaatttagtagaaaaagaggatgtactttaaagacaaagatttaatatatagcaaaaaaattaaaaaaaattaactgattgaggccaacaggaatcgaacctgcaacctttcgatttggagtcgaaagctctaccattgagccatagccccatcaactgtaatgttaattttgatttactctctgtgtttcgatttttaatatcccagccgcagcaatttaaccgcaaaaacgatgtttttggacattatgagggtacacaggtataaagaagaatatcaagtttgacattagttaataaaattctcagaaaaaacaataaataacaaatgtaacacatcataaaaaaataagtttaaatttgtaaaaatatttaaatttacttatcaatatatccgcgataaggaaattgaaaagtgatctcgttgttatatgaaaattataaaaaaccatttaacttagctttggaagttttcaaaaatgatgctgaaaataaattagattttaaatttataattactttctctaataaagtcacacaagttgaaaaccatagaactataacttaaaaataaagaaaaaattaaacatatatatattaattgatccatttgcaggtatttatttaactagaattacctcatcaaataaattaatcaaacttaaacttttatttatatgggaattaatatctgctatttatgtatattctgaagattttataatttttggtgattattttggtaatttagtaaccatcaatgttaattatggtgaaaatacactaattttagaaattcatagcatgtttaatttctgtaataatccaataacaactatttcgttgtaaaaaaatactaaatttgaaggtaacaggtataaactatgtacgtacaaataatggtaatatttacaatttaattggaaattagaaaaatgatgcagagttaacaaaattaactaaattgaataataaaatgataattttacaaataaaggagaattgcaaatttatacactattggcacgaaggagaaagatcaaactcagtatgaaccttttcaagttaagaattgatcattttttgaaaacttcattacttacagatctacaattgaatttaaagaatttaacattattataaattgatatacatatactatatatatttataaaattaaacacttaaattaacaagcacatcctttagaattgttgtttttaggacaagcacattttattgtttcacagtggttgcaattacaagttccttggcaaacacatttagttgattgacaaatacaattattttcattttctgaacatgaatcacattgacatttatcaccacattgacatttctttggacatgcacatgatggtaattcttgttgagttttagatttactatcatcacataaacatgggttagtagtttgagtttttggtgtagagcaagaacaagacatttctagttattttagttattttagtttgtttgttgtaaaagaaagtttacaagtttgcattcttacaaaaagagtggggttacatgctcttttatacaagtaaattgagtttaatttgcctaaaaagcttataatgagtttatattgccttgtatcattaacaatgagtttattttgccattgaaaaaaaagcataatatggtagcataattaactcaaaaaaaaaagcaaaaaaagcaaaaaaatagtggaccacacgatgtcaacccctaatacccctgatgttttgagtgctcaaattcaagatattcttactgctgttggatttgagttgttgtagtagataagaagaatatattcacatgtttgtgctagaaaatgaactgccctggtgaattctactgttgatgctagaaataaaggtaactttctcggagaatctttgaccatttttaagagtgtgtgctaccaatttattttagaatgcccaaatcctggtttaccactttcaactgtcaaagttgcccttgaagattttacccccactgtttctaacaaatctcaagtgttcacagtcagggaaaaaggaaacaagggtggaagaatatcatttgaaagaaatttagatgaaattatatgctcaagatgttgacttcctggtctttttgtatctgcatctagtggttttgcatggacggcattcagtgttgccttaccaggctcattaaagtacttgctggatagttgtttaaatactcatataagtacccataaagttcaatttgaggaatttaaaataattagtggtaagatttttggtattgctaaagatgctttagatgttaagggaattggaaggattaaattagtttacccagtttctggttattaaataactctacacaatgttcattatgtcccggatgtcatacagattcttttgtcaatcaaaagggcatccaaatttggtatacttcatttttcagaataaaaagtttattttactcacatagtcaagtagtgaagtttaatatattaagtttttcctggtttattagatgtgtcaaaaatatatgggtaaaaactgcagtgctgctccaaagttatcgaaagggtttaattatccaaaatattatgctacagttaaacataatgagattggtcagttactttatagaaatttagatcaaaatagtagaaatagtgatgcacatgacaaagataatgttcaaaaaagaatgtctctcaacaggaaataattaaaattaagcatattttcaatgatgttgtagaggaggatctaattaaagataacagtgataaaactggtaacattataagtagttacagaatgatgtgattgatttttgagtatggtaggatgttgacattggtaattctaggccagattgaataataaacaatgagattgtattattaagttgaacctcgaaggaccaataatatatttaagtattgctctaaaatcagaaaaaaaattacagtcaaacttggaattcttagtgtaaatacaacgaagaattccaaggtttgttaatatttcttttatgttgttattttatatactttaagttattttaatgaattatatagtttgttcctttaatatcgttgttgttgtaaatatgaatcctgcacaaagagtggttagattccaacagatcaaatcaaggagacttgggaaagaaaatcaattggtataagagttattaaattaatgatttagttcacactgtaatgccatgcagaactaaattatagattctaccttttggtaaatcgggctggtttgtaataaaattaataattttaaatggtatttaattaacatgcattaggtctttcaagcaggtcatcttaaaaaatgagagtttttgataaaacacaatcaagttttatctgaactaactactcacataccagttttaccgacaaagtagtatcaagtaggcttatagcaactataaatttacattgtattgcaaagatcttttccaacttaagttgattacgtttttttttttttttacattaatttcattaaaatatacaattttatacagattgattacttatacgcatatattattcatgcttcatcaattcaatatatcttcatatactgaactatatgtaaattatttctgtttgattattctcaatctttttcatctaatttagatctaataagaactaaatttttcatatttgaatagcaaatatgtatctttaatatatctttttgttatcctaaactctggatcattcttattgcttttgtagcattgtttgttaaaaaatataattaacttgattattatatttgctttataagcatctttctttgttgatattaaaccaacaatattctttagatcaatttttatctctaattcttttagaattatttcaattcctttacagttgaaaaagacatgatgagtcccaccttccccttcgcagaattggcaagggtgataaaaatgggaattcaacattcctgtttgtaattcaaataattcattaaaatcaacatggttttgattggtgattctacccaaccaaccaaagcatgtttcccaatccagttgatggtctagtttaccatcccaataatcagcattaaatttatttttaaattcttctttgtaaaatcttttagaaaagtgtttaaatgattcaacattgatttcctgatttttattgaaaatttctacaattttccatttttgaacatttttttctaccattgaaaataacgatgttgcattgaaatctgtagtttctttaacctgaaaatctgagtgaatattagttcaataataccatccttgtaaatatgggaaaatattagagtacaccattaatggtgctaatgtttttgaagaagcttcatccatgttgtaattcatagggtgttcgataatgaaattgatatttggttcaagatcgattattattttccctgtatttacatttattattttaggttttgcaacctttaacatttcatttgaaagagtttcttcaatggtaatattacttccccatattttatgatttttatgcagaagaagactgaacggatatgttgaaattaatccattggaaatagtacctggtatttttatttttggtaagtttccaggtacagctctatttgatagtatgtaattttcaacatatttgtaataacaatgataaacgtagtgatttctgatcataacattaataatgccttgtaatgagtgtgagattattaatgtcaaaggatgttcatttataaattttaacttttgtttaatagtcgttatataaatgaaatatgctcttctaccttgaagttgtttaccaaggtcgatcagacccatacccccatttttgtgaggttgatgccatttgattcttctaactgcaattttcagcggtaaatatttaactaattcttttttaacataattttcaaaagaatttaaaagaggatccggaattggatcatgttgatcaaaataatagatagtggaataaatgtaagtattaacagctactactctttgatataaatttagatctaaaaacatagttttccttagtcttgttttcaattggtttattttattgtaccagttgattttcaacaagggaattcctagatagataggattttctttgatatctaaaattgatagcttcaattgatttatattagcaaattgtttgatattattgatacctttattattaataaaaattattgatttcttttcatttattttaagatccgaaatttgagcaaaattatttgaaattgataatgattttaatagttcattattgttctggtgaaacagacatatatcatcagcaaaagctagaatattgataaaaagcttagcatttaaacctctctcattgtatggattgtatttcattcctctaattgattgatggagtttaataatcagtggttgtattgcaagattgaatatcaggggtgaaaaaggtaaaccttgtcttacacctctccttaatggaatattaaatttatggatccaattttgattaactatattagccgatgctaacctagattggttaatagttgcttcaatagttgaattagggaacccaaatttttctaagatctttttaagatattgatgatcaatagaatcgaaagcttttttcaagtctactaataatatatgttgttcattggataatgatggtgatgaattgatttgattagcaagaatccttgcagtttcaatatgtaaatgaatatttctatgaagcataaatgcttgttgatgatgggagataatcctgtttgcaataggcattattctattagaaatagaaaagttgattaatctaagtgatgaatttgtaagactgataggacgtagatcatctattgatggaagatcttgtcgataactctttttgggaattaattttatcaatactttaccaatcttatcggttgtggttaaattgccttgaagaatgtaatttgccatgttggttagaatcacagcagcagaaatccagttgtttttccaatctctgtaagtaataccatcagtccctggtgatgatggaccattttcatttagccttagaaggtttttatatatctcttgttttgaaaaaggtttagttaaatcatttttctctttctcagttaattgttctttaatattttcagtgaacttgtcaaatttgttatttaaattttgatttgaataaatttcatttgatgcgaaaagatttgaataaaatgagttagcatcagttataatattttcatccaaattggcttcatttgaatgttttccaaatctaagtctaagtctcttgaagttttttgagagattagctgagatattgttgaattgaggatcattaaaatcaaatcctaattctttagatgatattttttccttatatgaaggtaaatgtttcattatctgaattactttatttgttttccagcgaactctttgcatatatgcattataatccattgatgggcttttagtatccagaatctcattggtgaaaatgtatttatataattgtttattttcaataatgtagtcaggaattgatggtattcttttgtaaaaattatctttattaattatattattattagaatttgaattgatatctgataatgtacatactaccggtctatgtgttgtaaatggtagcttttgatgtactctatatttaaaattgatatttcttagcagattgaaggaaacatggaaacgatctagccgattatttgttccatttgaaccgtggttggtataacatatacttcttctattatttggaaggaagaaaatatcatataaattattttccattaattgttgatgaagaaatgattcaatacgatttaaatttgttgcttccataggatgtgtattccaatcaccacaaatgattagattattttcaccacgagataatgatgataaagttggacataatgtgtcaatgaaatcttttttgttaatgcagtggaatctgttatcattaacattattgtaaactggtacataaacagagatgatagttaagttttcttgtttgaaatttattgttatatcacagacataaaagtttgcaagttgattctcacgattatgccttggaaaaatattatttgaaatgatttctattgaagaatggtaaataattgctgttcgatgttgaacagattgaatcgcaattttgaaatcgaaattggataataattgttgaattgaagataattcagttgattgatttagatcaaattctgtaagacacataatttgaatttttttattttttgcataatttagaatatgaattaatttagaaggactagttgccttctgaatattgaaatttaaaatttttaacttattcattatgatattttatattttttttttttatttttatatttttatattttattaaacttgaagaattaaatgaattagacttgtgagtctaaatccatttgagatttctttttttcaagtttctcttttctttctaatgccatttctatttttttagcatctaataatgtaccagttgctacactcttaccttgtttagaagatttaactaatgttctgacatttctaggttgagttggagtttttggcatacttcttgtagtttcggcatgcttagtttcaacaaccatatcttctatctcttcatcactatggatgttttcatcttcatttggaatttctggatcatccacattttccaatacttggaaaggattgaccgcattatcaacgttactgactattgatgatgatgaatctgacctagataagttcttaggtttagatggaatagagaagccatctgaatctactttgtcattattaataacaacagctgcatctagatttaaaatgtttgtagaggtttgggctctacttcttttcccattaccatttgtagttgatgttcttggagtaacaggagcgtaaaatacttgatcattaaccgttgcgtttctaattctcaatgcccacattggtaatgatcttgagagagtttttttgaagaaattctctcttgtttttgggtggagggaattaaataacctttcttgttcagcctccgatgattttggacagaaaatttctctgtgaccattctttggaatttcaccttctttgaccttatgtctagggttgtaacatcttctacaacttggtttcattggacatctagctgtagtgtggtctgtacatctgcagtatacacaatgtgtaggtgcagtagacaagtaagtggtgatggggattttatgtgtttttccacctgttgtgtgtgagatggaatgaattttaggtggtaaaactgatgattttagttttaacactgtgtaaataattttattttgttcgtagaacttcatattgaatgccattttggattctttttcttgtggtaattgacaagacataatttctccgtattctgaatagagatttttaataatttcatcatatttagatttaatgatgaaaggagggaactccgtttttaaaacaacaagtgtgttgttttcttcaaaagattgatccattaagttaagatcatatgaattaaatgtttctactaacatggtagaaactaattgtaataattccatcggtggttcagccaatggtaggttaatttttaaactgtatttatcagtattaaatatgtttgcaccttcttccattgtattctcagttggtgcatcaattggtttgctcatattattatgaactttgttgatttttttatttttaacaatattattgttgttgttatctttgcttttgtaataatcttcaaagataaattgaaactctttgtgcatttctgctaaatttgtagaattaatatttctttctaattcttttaagaaagaggataaaatttcttgtaatttttcaaggtctaaaaattgatctttgccaacttttagaaagtatgaaaggtgataaagatgatctttatcaaccttaatatttgcctccgtaattgttttatgcagtttttgagccaacgtcatggttggttgaggttctgcatttacctcttggactacttcatcttcctcagcgcaatcttgaaattcaatatcttcatcttcgtcttgagtttcatggtcagtttggttcaaaccttcgttttctttttcttcagcaaagactgaaggtaacttgttgaactcaccatggggtaagttgggcggtttagtaacgttttgagggtcgggaggacctgaatcgtcgattgtagtagcttttagggcccctttttcaatcattttttttaatttttaatttttgtatttttttatgtacaacaacttgcaggatttcctaataccacaacaaaaatgtaagggaataaatacaagttgttcaataatatccacgtgaagattaggtaagctgattacgtaaagatgataagatggaaataggaattccgagatacggaggttcggagatgtcggagtaagaaaggaatgacttagattgaaattgaattaattatgataaggagtggtatgattgataaggaatagtttaattaactatattaaggaatggttaatattgtaatataaataagtatgatatcctgtataactttgtataactctcttctgagaggggacattaatcagagtattagttagagaacaatctactaattaataccaaccgtctcattgctactcgctgtctattacacaaataaaaggtccaacgagtaaacttattttatacttattacttccattacgtaattaagtattatccactatcttacatattttagtttacatttggtagcaccggctagtgtttgtgttcctaattaaatcaaattatattcatctattaattaaattaaatcaactaaaaatgtcatctgctaaagataagattaatgctttaaagcaacaaattaaggaaataaaattaactgaaaagaagaagaagaaagaattatcaaagaaacattctaccaaacattcaaagaacgttattaaaaagaagaaacatattaaaccacctcttagaattatccattccgatcctgaaatgtctgattattcatttgatgatgctttttcctcagataattcccattctgataactccaattctgattctgatatttctgattccgatactgatactgatgatgataataaaacttctaaaaatgataaacttagttctaactttccaaaatttgatggttcttctactgatgataaaggcaaggaattctccactactgaagctcaacttaaagcaaaaacttggttatctaagttgcacgttaatttaattgataaaggtatttcaaaatcaagctgggctagaaaagctattgttaatctcgaaggtagagcatacaaatgggtagaacataaattagagaagaatccaaagtatttaaagatttcctgggaaagatttttacgtgatttcaaaaaagaattttgtcctgttattgaagatgatatgcatgctatggattacaagattctaacttttaaaatggttccaggaatgaaagtctctacatattctgatcaatttaaagaatatattcaagaattggattttgaagaatctactaaatttcaaatttcaagatatttacttggtttaacacctgaattgaaaaagatggtatcccaacaaaaacctcgtaccttgaatgctgctattcattatgcagaagattctgaagctattttgaatgatattgaagaagcaaaaccaaaaaatccttggatcaataatatcgaacatcaaactcctgttagacgctcttattctcgcccatatagagttaataaatataaacctggttatcataataagcaaagatttttcagaaacaaaagaccatttaaaaggtacaattcaaattttaccccaatcggtggtaatcgttccatgcatttttctcgtcctactaaactaaataataaactatctaataataataatactagttctttttcttatattgcacctccagtaagtattcaacccgaagttgatcatttaaatgtcgagaaggaagaaggtgatactgttgttaataattctcaaagggtgattccaagagatgagactattaagaagggtgattcctctgaagttaaattgttaaagggtgattccaaacaagaaacaaatagtccaactttaaacattccttcattacctgaaattttacatgttaatgctttgaatattgaaaatttacgaaaaatagatgtacaaattgataataaaaattccgcatcagcaattattgatactggatccaatacagatgctattactacaattttatgtgatgaactgttattatcaagcaagattagattatatgttgaaccaattagtgctattttagttaatgatactgttgatgctattggtgaactagatatagatattgatgttgatctatttaataatcctatcaaagaaaaaagaacatttttagttttgcaggcaaacaccaagaaattaattttaggacttccatttttcaaacaacattatgataagttagatatacatgattttattggagatagttttgcaacaccaagtgttaatgttaatttaattgaatatcatgatagacatatttctactattattaataataaagataatgattcatatctaatatatattaattcaatgaatgttgaatcctctgaagaaaatgatattaaaactattgataaagaaattaataatgttgaagttaataaatacagaaatgatattttagaaaaatttaatgatgttgttactatgaaagaaccaaatgaacttcctcctaaaagaaatcacgaacataaaattattttagttgaatctaataagcaagttaatagaaatcaatatcctttaagttattcagaaaaggaagaattaaccaaaactgttgataagttaatacaacaaaaatttattagaattagtgatagtccttataatagccctgttttatttgttaagaaaaaagatggaaccatgaggatgtgcattgattatagattgttgaataataacactgttaaagatagatttcctttacctcatatagaagaaattatttccaagtttgaatctgctgttgtttattccaaattagatttaatgtcaggttattatcaagtaagaatccaagaagaagatattccaaaaactgcttttagtactgattatggtcattatgaatgggttgttatgccttttggtcttactaatgctccagcaacttttcaacgtatgatgaatactatcttatccaaatatttgaatacatgtgtgcaagtttatttagatgatatttttatttattccaaatcttataagcaacattatgaagatattaaaagtgttttatctacattaagagaacatcatttaattgctaagaaatcaaagtgtgccttcttttacgatgaattaagatttttaggtcatgttattactaaaaatggaattaaaactgatccagataaaattgaaaaggttaaaaattggccaattccaactactgtcaaagaagctcaaatgtttataggtttaacttcatattatagacgttttatcaagaatcattctaagattgctgtaccaattcataaatttattaccaaagaatcaaaatgggaagatgaacaaactaatgcttttaatcaacttaaagacgctttaattaacagtcctattctagtacatccaaaatggaataatgattgtacttatgttgttcatactgatgcttgtggtagtgctttaggttatactttagaacaattagatgaaaatggtaaaacaagaggtacaattgcttatggttctaagaaattaataggagctcaattaaattatggtatttatgatagagaatttatggcagttgtagaagctttaaaaaattggagatattatttattaggtagacattttgttattgttactgatcataaaagtttaatttatctacgctatcaaaatttgattgattcaactagggttgcaagatggcttgattatttatcacaatatgattttgaaattcaatatgttgcaggtaaagataattctgccgcagatgctttaagtcgttatccatatgaaaaattgtctgttaaagatgctttagaagttaatcatattaaatttttaggtaattcaaatagaaattcaaataataatattcaaattaataatactgaagttactgttactacttttcctatgaatgatgaattaaagaatttaattattaaaggttataaaaaagataatgtacttgctgatgtttattcaactttgaaaaataaatctgaaattcctattcatttaaaccaccatattaaacattatcaacttaaaaatgatttactttattataaaacattattagaacaagattgcaatagattagttattcctcgttataatagtttacctcaaagatttattaaaaatgctcataataatcctacttctggtcattttggtccttggaaaacttatcaaactttaatggattcattattttggtttaatatgatgcctacaattaaaaggtattgcaatagatgcattgtttgtcaacaaaataacacttctactcagaaaactcaaggattatttcaaccattacctgttcctgaaggtagatggactgatgttacaatggattttgttactggtttgccaacaactacttcaaatcatgatatgattatggttattactgatagattttcaaaaatgtcacattttattccaactgtgaaaactttaactgctgaaggttgtgctaaattatttttagattattttcttaaacatcatggatttccaaaaagattaactagtgataaagatattaggtttatgaataaattttggtatactattcattttttctttggtgtttctttattgttttcaactactaatcatccacaaactgatggtcaaactgaaagagttaataaagttttaaatcaattattaagaaaacattgttcaaatgatcatttacactgggatgaatttttaccaatgtgtgaatttgcttataatagtacttaccatgattcaattaaatgttctccttttgaattagctataggatataaaccagattctatgaaaagtgttaatagttggaatttagatgataatagatatagtccaaatgctcaagaatatgctagacgtatgagattaactttaactcaagctcaagataatattgtacaagctcaaagattgaatgaaaaatatcataatagatcacatagatttcataattataaagttggtgattatattttattgcatcgtgatgcttttggtgcttttgctaaatattataaaattcaacctgcttattatggtccatttagattggtgaaaaaaattaatgataatgcttttgaagttgatttacctaagattaataaaaaggatagagtattaaatattaaaaattttcgtccatatgttcctccagtcgatttattatgtcgtccacctagaactaatgctgaaattttatcaagaattaatcaaatgtgtggtattgctggttttgatgaagaaaagaatacttttgatgtttattggagagattgtgatcctttacttgctacaactattactgctgatcaatttaatacggcttcggaatcacttcgtcatagtttatttcataatgccaagatgatttgtgctcatgagcaaattgtttaagtatttgatttaatttaattttaacatcagggacgatgtttcccaacagccggggtaatgtaagggaataaatacaagttgttcaataatatccacgtgaagattaggtaagctgattacgtaaagatgataagatggaaataggaattccgagatacggaggttcggagatgtcggagtaagaaaggaatgacttagattgaaattgaattaattatgataaggagtggtatgattgataaggaatagtttaattaactatattaaggaatggttaatattgtaatataaataagtatgatatcctgtataactttgtataactctcttctgagaggggacattaatcagagtattagttagagaacaatctactaattaataccaaccgtctcattgctactcgctgtctattacacaaataaaaggtccaacgagtaaacttattttatacttattacttccattacgtaattaagtattatccactatcttacatattttagtttacaaaaaacaataagcgcaagtggtttagtggtaaaattcaacgttgccatcgttgagcccctggttcgattcctggcttgcgcatttattttttgatacttatttttatagttgctccttttctatagatctctttttaaattctattatcagtctgaaggtattctgttttattatttacaaagacaactagtttattaccacgattgattgtggtcactctgaataatttcctgtgaaagaaagcttcatcataaaaaaccccatataatagctaacaaagcggaaactccgtccccgcattttttcatggaagcctctttgcaatgtcacagtgacaggattattcaagctatattattgtccgatcaacggttgattatattctttatatctttatttattcttgaatttatagataataaataatatgacaatatctcaaccaataccgatatggctagactgtgatcctggacaagatgatgcagttgcaataattgttgcaacttactctccatattttaatcttttaggaatctccacagttcatggtaatgtttcattaaaatatacaacttcaaatacattaagattattaacagcacttaataaaacagatatacccgtattcccaggtgaaacagtcccacttaataattataaagaagttaatgcatcatatgttcatggagaaacggggttaaacggatctaacttattattagcatcaaggatgacacctaaggataataaagactttttcccatatttagcaaagcagatagaaacttatgaagggttaataaatattattgcaactggcccattaactaatatggcagtgtttttcaaagagtatccacatttaaagagtaaaattaaatttttatctataatgggtggagggtttacaaaatttaatgtaaataataatgcagaatttaattattattgtgatccatttgcagctaaaataattattgaagattctgttttatcatcaagaataattcaagcttcattagatataactgaaaaaatatttattactgatgaaattcaaaaaagagtattgaaaggtaaatcagttgaaacaacatcaaattttagagcaatgctgtttcaattaatagactcatttaataaacgtatgttaacattgaataaaccaaattataaaggcccagttattcatgatccagtagcagttgtggcattattacaattcaataatattacagaagaatttgatttccaatataagagaagaaaatttgaaattagtattgaaccttcaaattatggtagcattcaatctgttaaggaagatgttgaagatggaatttattgtctgcttgatttaaatgttgatgcgttttggaatgaagttttgcaaatttacacttttgcagatgataatgcttttatgaatacactatcccgagatgagttgattgccgagtacaatgctgaagatccagacaaatacgggttgtaatttggtatataatatacggtattaattagtctattcttcggagtaagactaagcggccagtttcaagcgagcttatttcctaaaagggaaattgcagataacattttgccgatttgagagatcatctgtcatgaatgataagctttgctgtttaaatataaatacccgtagatgtcgccttaatttaataaaaatatataatatttatagaaaacaaaaataaacaatcgaagaaatgacagttacaacttttagtcaaaattttaaaattaattcaaaggaattagttgaaactattcactccactgctgatcaatttggagctaaaggagtttggggacctgaaccaacacaaacaggtgtttgccgtttagcattatcagatattgataaacaagtaaaagattggttcattgaagaaacaacaaagttaggatgtacaattaaaattgatgaatgtggtaatatctttgcaacatatccaggtaagaataataatgctgctgcaactggtatgggatctcatttagatacacaaccaacgggaggtagatatgatggtatttatggagttttaagtggattacaagttttaagaacattaaaggctaataattttgtaccaaattttccaattacattagttgattggtgtaatgaggaaggtgcaagattcccaatgagtctaatggcttcaagtgtttgggcaggtgttaaaacaaaggaggaaatttatgcattaaaggatatttatgataataaaaccactgtctatgaggaattaaagagaattaaatatttaggtgatgttgaatgttcatataaggctaacccattacatgcacattttgaaattcatattgaacaaggaccagttttagaaaaatatggtaaaaaaataggtgttttaacaggtgcacaagcatataattggttaagtattaatatcaagggtatgtcacaacatactggtacaaccccaatggaatttagaagagatgcattattagcaactgcaaatataattgttggaattaatgaagttgctaaaaaatttaaaggtttagcatcaattgctaaattaagtttattgccagatgttgttaatgttatccctggtgatgttgattttgtgcttgatattagacatgaaacagatgaaggtttagtaaatatacgtaaaggttgtttggaagttattgaaactgcatgtttaaataaagcaggtaatggagttaaattagaatacacaattgaagatccatatccttaccctgcaacacatttcaataaaaaattagttgaaattattgatgaagcagcaattaatattgttggtgaagatttaaaacataaaatggtcagtggtgcaggtcatgattcatgtgcaactaatttagttattccaaccgcaatgattttcgttccaagtaaagatggagtttctcataatccatgtgagcatactgaacctgaggagttagaagctggattccgtgttttactggaagctattttaagttatgatcattaccgtcttagtgaatagttttgtataaagagtttgtaaagagttttatagattaaagttactaagaaaagaccctgtgaaaatacgcggttaaagtggtgattacccgatacggtaatcggagaagtcaacgatggcggatttttcagaaatttccaattttttttttcattgagtcataatgatgattgaagttgttaataagttcactgtcattggtggttttcttaaagtttttttctttctcttatagtttatttctcattacttttatacaaacaagatgtttagtattaatactagaataagaattcaaagatctgctagaacttttgcaactagtagaaattcacttgcaggtcaaaatttaattgaaaaaattgttcaaaaatattcagttggattaccagcaaataaatcagttcattcaggtgattatgtctctattagtcccgctcatgttatgtctcatgataattcatggccagtcgcacttaaatttaaaggtttaggtgctaaaaaggttaaaaataatagacaaattgttaatacattagatcatgatgttcaaaataagagtgaaaagaatgttgaaaaatatgaaaatattgaaaattttgctaaagagcaaggtattgatttctatcctgcaggtaggggtattggacatcaaattatgattgaggaaggttatgcattcccaggtaatttaactgttgcatctgattctcattcaaatacttatggtggtattggtgcattaggtacaccagttgttagaactgatgcagctgcaatttgggcaactggtcaaacatggtggcaaattccacctgttgctaatgttatcctagagggtaaattaccaaagggtacatcaggtaaagatataattgttgcattatgtggattatttaataatgatgaagttttaaatcatgcaattgaatttactggtgaatcagttaaagaattatcaattgattatagattaacaattgctaatatgacaactgaatggggggcattaagtggtgttttcccaattgatgatacattaattaattggtataataaaagattattaagagttggaccaaatcacccaagaattaataatcaaacattagaaaaattaattaataataaagtagttgcagataaggatgctttctatgcaaaaactttaagaattgatttatcaactttaagtccatatatttcaggtccaaattctgttaaaattggtacatcagttgataaattaagtgaacaagacattaagattaataaggcatatttagtttcatgtacaaactctagattatctgatattaaggcagcagcagatgttgttaaagataataagattgcaccgggtgttgaattttatattgcagctgcatcatctgaagttcaaaaagatgcagaattagatggtgcatgggaaacattaattaaagcaggttgtaaaccattacctgcaggctgtggtccatgtattggtttaggtgcaggtttattaaaagaaggtgaagttggtatttctgcaactaatagaaatttcaaaggtagaatgggttccaaagatgcattagcatatttagcatcacctgaagttgttgcagcatctgcagttttaggtaagattgcatcaccagaggaagtattaggtgaatcatgtaaaaagagtaatgaagttaagaaaacagttataattaatagtccaaagaatgatgaatcatcaacagatgtatctgaaggttcatcagcatcaagtacattagaaggattcccagaaagtattgaaggtgagattgttttctgtgatgcagataatgttaatactgatggtatttatccaggtaaatatacatatcaagatgatgtttcaagagagaagatggcagaagtttgtatggaaaattatgattctgaatttggttctaagactaaagctggtgatattattgtttcaggttttaattttggtacaggttcatcaagagaacaagcagcaactgcaattttagcaagagatattaaattagttgcagcaggttcatttagtaatattttcggacgtaattctataaataatgcattattaacattagaattaccagaattaatcaatttattaagaaaagagtttaaggatagtgaaagtgaattaactagaagaactggatggacattaaaatgggatattccaaaatctattgttacaattaagaatgataaaggtgaaattgttttaactaaaaaagttggagaattaggtactaatttacaagaaattataattgaaggtggattagaaggatgggttagagcacaattaaaaaaggagtgatatttcaaattgagagttgttgattgtattatacctaatagtttaaaatattatatatatatatattgtatataaataatgtacgatttttttatatagtaattagaaagtttttttttgaaaatgtagttaagttcacacataattataattataatgattgaacttcttttgatatttcatcataagaatctttataatcattttttttatcagaagctggtacaatcataataacacttgttggtctctttgtaccaccggcaccacctaaatcttcctttgaaggaatgaaaacgtattgaacaccattatcttcacataagacgggtatatgagagataacatcagcaggagagatatcaccagcaatgataactaaacctttttcaccttttcttaaagctttaacaacttccttaacacctcttttaacatgtttagcctttgcagcttttttaacagttttcagaagttttttatttaattttttatttgctaaaggttgagcaaatggtaaaacgtaagggagtttaagatcgtagttgtcaacagagtcagcagattcagatttacccatattgattgttgtctaaagaagtgtagtatctatgtcttggaaaataaaatttttttccctaactgaaatttaaaatggaaactgaaatttttactatgtacagagtcgcgtctatataatataagaatacacactttatttatggctcatttcatttaggtacttcaagaccaactcttctagctgtcttcttaaccttgtctgtttgtttcatactgatacctggattgtatctctccaatagggcaacatattctctctgtgaatcaaggaaaagtgataaattattaatatgttccacttcaactggatgtaatgaatctttatcaagatgagccaccattgatatatcaacttttggtatctcattagcaaattgtttcttaacttcttcaactaatttactatcatcctcagttgttaatgttttacctgcttgcatatattgcatacgacgataatgaactaatgcatcttgtttctttaataaatctttattatgtgctaaatgtgctgatttactactttcctcaatagaggttataagcttcttataaagtgtacgtcctgacattgtctacttaaagattgtgaaaggaacaagagattatcattaaagaaccaagttgccattcctattaattaataaattgaaaaatttcccaatttttaaaaatcatacagtcacgtgaaattacgtaatctgagttagaccttttacatgaggactattattattattattatcatgattatgattttaaaactttacaagtcattagaagaagacattctcttagtacaattcacattcacatgtctgagatacccgataagtggtctattgctgctcaggatatagccaatcactcagatgatttcactaaatgggaaaactttattaaaatatcagaaagtaccaattcatcaaaattaataatactttcttacgagaatttattggttaaatatccatatttagaacaatactggattaattatgctcgttggtttttcaaatttaacaatttacctaaatcaattgaaactttcaaaagatcattgaaaattatacccaattccatattattatggaatacttatcttgatttattacttaaaattttcccaaatgatgaaaatcttttaccttattttgaaacggctagaatttcaataggttatcattattattcatcaattttctatgataaatatcttaaatttttaaatgatacaaatttaattcatgaatattatttattattaagaattataattcaagtacctcaacatcaatatttaaaatattttaaaatttatttaaaattaattgaaaatgctgatttaaaatcaattaaatatattataacatcatcagatttaaagaaattaacaaattttaaatgggttgatttattaattaatgaaaataattttaaaaaattaaaattagaattaaagaaaaaatttactgacttatacatcacaacacaatttcattcttggaaattttacaattttgagaaaaaattaggtattaattattacatacctcatagagaacttacaagattacaattacagacatggcgttcatatcttgaatatgttgaaaatttaaatttaaaagtagccataaaggataaagaacaaaatttattgaaaaataattttaatcaaattgatacattatataatagatgtttgatagtgacaaatgaatatcattttttttggattaaatattctaattattatcttaatttgaatgacataactaaggcaaaatcaattttaattaatggtctttacatgaaccctattaataatttaaaaattagaattagacttattgatttatacgttataacattagaatttgataatgcaaaggcaataatacacgagggattaaaattgttaccatataattatcaattatttatcaaattaattgaaattgaacattttacattaccttcaaatgttgaaaaattaattatttctaaaataactgaaatatcaaaattgaaaaatcaacaattagagaatcaatttgattatcttttcatggaaatgcttagttattcatcaataactgtatcaagattatctaaaatttttgaaaaatataagaataaaaaatcttttaattatttaaaggctagaaaacaatttatgagtttttataataaacctacaatattggaagataagaaattcccaaatggttgggaatgtgaatatttttaaaaaacccaaatttgaatatattatataatgattatataattttgtaaactaaaaataaaagaatgtaaaataatgattatgaaaagaaactattaataatttaaaaccagtttaattatttttaataactttttcataatattcaccagctgataagcttaaataataatcttttaattttaaattttcttcctctaattcaggtgtccaagattcatattcctctaaactaccaacaggtctctcagcaattgttgtaactctaaatgcatgtctaatatcagttgaatcccaatctaaagttcttgtatgtaagactcttctattatcccaaacaacaacagtattttcatcccatgacattctaacatgtgcatctaaacatgattgtgtatgtttaaataaaaataataataaattatcactttcttcactctttaaacctaaaattcttcttgaaaaacctctatgagcaaataaaaatttcttctttaaaactggatgatatctaactaatggatgaattgattcaactggatcttttctttcaataccaccttcttgctttgctgcatttgcttgttcctttgatgtatgaacaacttttaaaccttctaatttctttttcattaatggtgataatctatcataaacttcaaacatatctaaaaattgtgtatcaccaccactttcaccagtttgtaacattgtgaaaaatgtaataccaggagtttgattttcataagtaacatcagaatgccatccaatactatttaatttatcactaaattctctttgatattctttactatcacctcttctaaatgtcatatgaaattcaggatgatttaatggagcaccagaagttggatgaacatgtaatggaccataatattcaccaatttttttaatttcatcaaattctaaatttttaaaattttgatttctaaatgcaataacaccaaatttttcaactaataatgctaaatcatccttttgtttattatttaattcacttaattgtaaacctgtaatttctaaacctaattttggagttacatgtttaaattcagtattttcaacatttcttaatgatttaaattcttcatcaccaaataaacctctatcaatatgtttaaatggtttaatattttcaaatgcgtgatcatcctttggatcccaagttggtgcccattgaggataatttaatcttttaagatcatttttagaaacagttaaaataccatcagatgattttgaatcaacatctttttggaaatgaattgatgaatctctataatttctagttaaaactgacattttattttgctaactgagtgttgtgcagtgatatgaataagatatacctagggggcagagcaaatagtataaaatgaagaaccattgcatagtatttataccctgggcactgtaaacttatccatcataagttgcttatcagagatatcaaaattacctatttgggacaatcatctcatttcaaaaaaattttgaaatttccaataattttcatttaagccacaattgtggtggttgtggtggatataaactgtggtttttatactcaattaacaccattaattattgcattgaatgaagttacaataaaccacactgccacaccgataacacccatccatctcttaaatgtccatccattaataggtaaaataatactatacataataagcattgaaattatactaattgatgtaattattaaacttgaatcaactgtaaattcaattgtattcttagattgtgataattgaataattaatgaacaaactccaactccaaataatatataaagtaatggactaccaaaacatgcatgtaatccagtcaaaggacgacctaatcctgcaagtgctaaatttgtaacaacatctccaatactattacctattgataaaatggtcaatccaaggatggattcattaattgagtaaattatagctaaatattttaataaaagaatgattattgatgcagttagagttataagttttaaaactgttaggaatccgaaaattgctgaaattggtgggaaaactaaattgtagtatttaactgaaagtttttggaaaacgattgacatagttgggaataaaatcattaataaaattattattaaattaatttcaaaatcagacataagtaaaactaatatacttgattgtaaatggaataattttgtactgattgataattcatgtttataaatttcttcattaagttctaatggtaatggttgtggtataattatattgaaaattgttgagaaatggtataattataatacttaataatttttcaccaaatgaggtagataatctgaaaatatgaattgggaaaatctttgcaaacatattttcagttttttgatattcaatatatggtatgattgaattgatagaattgattgaatcttcattaaccgtattttcaggtattgataaggtattaacattactactcataggatcaatgggagaatcattaggtatctctctatgtacttcactttcttcttcatcaattatttgaaaattacccttaaatggtgtaacattatccacaggtgcttgaggtgtagatctttgtgaataaagtggtaagttagtatttaactttaatgaacttccaaatcttttaattgaactattttgtcttgatgggaataatatttgataatcatttttatctttacttttcttactatttaatcgtgaaaggattggtgtactactatgagatttatttttatatgccaatttacctggtgggtccatattattagtatctgtattgtattgtatttgtatttgtatttgtatttgtatttgtatttgtattgtattttcaatttcactatcgcctgtatgtgtagttttaatattaggtactgtatttattgtaattgttgaattagttatatcattattaattgtatcatcattttcatcatcatcctcttcttcttcctcttcatcatcatctcgtacaatatattgtaaactttgagatgattgattagaactttaacggtataacttcattattttgttgttcaatatcataaggtggtactattcctagatgttttccttttacataaccaagctaattttaatgaatccattaatgcaattttataaccattaccttgatctaaattatcgacattatgagcaaaataataatcattcatacttgcattagaatctgatgaagtagtacttaatctatcaagattatcatcattattcattgatataactgataatctattgttatttctaataatttcatcattcggtaatgttgataaattaacctgtgttaatgaattattattattaatattttgttcatcaattgtaatatcttcatcacttgattctaatttttcatatttttcatgatttggtaaaaatatattaagtataataaataaaatgtaaagacaacataatataattgattcaaaaatactgattgtaccatcgaataagataattaatgaaataatcaataaagttgaaaatattattaaatctctagtaaaagttagtttgattaactttaaaaggtttataaattgccataactccgataactacagtaagtgcaaaattagcagaacctaataattcaccaattgccattgttgtcatacctttattcattgcaatataagttgataatatatcgggtgatccatttgcaaatgctaataatgttaaacctgataatttttcatccatatttaaaaaatctgataatgcagacatatttggaactaaataatcagatgctaataaacctaatataataaataataaaccaattgatataaagataattaaccataggattatattggatacgattggattattaccattggaacaataataatattttaatgataaatttgtaaaatcattacatatttgaacattatcctttaaataacgacaaatttcttcacttgatgaattatgaggtatgatacattgatcagtaaagggttgaatcaattgagacttccccactagtccccaaagtgattgtaatgccattgtttgaaaagaaagaaggtgttactgataaacagaattaattattataatacctaacatgatgttattatgtcatgaaaataatgaaaatattaaaacaccaagaaaatttattttacttggtaaagaccctaaagtataattatttacatgttttaataatatataaagtctaaatataaagcctaaatattatatacaatactaactttcataagggtgaacggtaagatcatccaataaagtttttgggattctttcacttccaacaaatggtaaacctaaaccagataataaaattctagcatcagcatcagtttgggcagttgtatgtaaagttatatcaaaaccatataaatttggccaagaatcttgatttaattcaatttctgggaaatatttaatatgatcagaagttaaaccaaatgcaatattaccatatctatcaccagctctatttgatataccattaaattcaccaattctaggtaaaacaatttctgttaaagttgataaaaattgggatgcatctctaccaaataattcaactttagcacccattttcatacctggtcttaatttccaatttggaacatttgtctttgcataaataggttttggtttaacaccagttatttgttgtaattgtaatgttgcaccaattgccattgcaggatattgttttgcatctttaacaaaacagttgattgaaatactttgtaatttagcaatatttccggtatctcttggattaatagtttgtgagggaacaatttgaccctttggttttcttaaaggtctattaatttgatatggagatgacatatcccaatgtcttctcttattaccataaattggttgttgtccatgtctataacctattaataataaatctgattctaaaatattatgataatgatgatcaactctatctaaatgagttaaataaggtctaaattttggtgatttaatatcatgacttggatatttaagttcagggaatcttggtgaaagattttttttaataattctaactttatgatgaactggcttaacttgtgcacaagccgccttccccaatgaaacagatgatgagaaactacgtaccgataccaacgtcattgtatactatggagatcctatgggttatattctctgaagatctacaagaaagaattaaaaggatcttctataagaaatggaagcagttgaaggtggaaaatggaaaatttatttagagggcgggtaagttggatatatgatggtttattataggtggttcttcctttggggtagatgcgttttggagtgtatgagcacgtagagagtgacagtaccagtgacagtgatggtggtgaaattttggatgatagggaagtcactagtgtctcttctttggaggatttgacgcagtttttggactcttgttcactttctgagagattcaacagagccgctgatctggctgagagtgtcgttattggatcaaatagtacttccactagggagaatagtactaggaaggatcatcaacagagtaagggaagtaaggaaaatatagaggataacgttcattcgtataaattacccaatttagaacaatatttcactaatgagtacttaaattatcgtcaacagcataaagatagcgtggatcgtttaattcaattagaagaggagagaatacgtaaagaggaagaggaacgaaggagaattattgaagaaaaagagaggaaagctagggaggaggcagaaagaatagctagagaagaagcagaacgtaaagctaaggaagaagccgaacgtaaggctaaggaggaagctgaaagaaagagaattgaggaagaacaattgagaatcaagcaacaacaggaaaaggaagctagggagaagaaggagagagaggaaaaactacaaagggagaaagaattgaaattacaacaacaacaggaagcattaaagaaacaaaaggaagatgaaattaaaagacttaaagaacttgaaactaattcaattattagacctacacaaattgagacagagtttaataaatatttacaagatattaaagatattgaatctcaaattttattacccgttaaaaatgatttacaattaaagaaaaatgttggaggtcataaacgtaagattaatcctaaatttggccaattaaccaatagtcaaaatcaattgagtaaactaaccagtgaaataattgaacttattaaacaaacacagagtaatcaattagcatttaaatggattttaaattttatatcagatgcaattatttcacaagcggagactgaagtttcagttaaaccaaaatcttcattacccttggcaaaattaacacttaatttaatgataattttcaatgatttacaatatttcctattggcaaaattttatacaaaatgtccattcctaattggatatacatgttcaaatgaaactgaagagggtagaatacgtttaggatttaatagagatgaaactactaataaatgggagaatgaaattcaatataatgaaagattatcaggtatttcaactctttattcagttataacgagattacaaataaatcaatcatttattggttataatgatcaaattgttcaccccttaccaatttctaattcatggatatttttaagtagattattagatataccaacaaatcaattaaatgaaattcattttaccatagttggtgcatggtgggatgcatgtgcaatacaatttttacaagcttatggtagacaaagtattaaattattaaaattaattgtaaatgaatggacatcaattgatggtaaatcatcagcaagtagagttagattgaagttattaggtgaagaatggatgaatggtcaaatgaagtcattccctaacttagaaccttgaactgtgtcaatatttttgtattattttatagattatagaaaaccagtttaatttgtcatgcaaatgttttttcatgtaatggatactgcattcctttcgataaccaatggaaagaccacaaatacctgactcaccagccactccatttcccatcttacttaataaaagcactgttataccaggatttggacgtggatcatcagatcttggattcccaactgctaatataaacgttaaagataatgaagtattgcaaaatcttgaacctggagtttattttggatttgctaaattattcaaagtaagtagtgacaataccgaaactaccaaggtagagagaatagatggtaaatcatcagtggaattaaactatggtcattatcttaaaactgaagaattagatgttttaccaatggttatgtcacttggatggaatccttattatggtaataatgaaaaaacttgtgaaatttacataattcatcaatttagtgatagtttctatggttgtcatatatcaagtgttatttgtggttatttacgtcctgaattaaactatacaggtgttgaagcattaattaatgatattaaacttgatgttaaaatcggattagagaaattatctaatcctaattactctaaatgtaaaaatttattgtagtagtatcatatgtattatataggaacacttacataagtttaatcttactttcatccgttttaactttaaatcctaacataccttttaaagtttcaattgcaactgtcatcattttactaaaccagaaaacatttaagatatcaagtataaaattacaacttaaaatgattattgcaccaattgtagtaaaattagcttcattcttagcatcatataaatcaatacctaatctgaaaacttgataccaaccccaacaaattctaataaagaagaagattaaaatcaagataatattattaattaatttaacattttcacttaaaacattaaattttaacccaacccaccttatatcaaggaaaggagttgaaatttcaaataataggaaaattgctgaataatattgaataaatttatattcaactgcaattgtgaaaacaattgttgaaacaattccatgaattaaaaatccaacaccaaaatatttaacataaattgttgagattattgtatcccaaataaaataacttaatgccattgaagtataaaattttgaatatggagttgttgcaaatacatgatcaatattcaaatatttattattgaaaactggaatacctaaaaagcaaataataattgcttgaataaatgaaacaattctaacacaacaatctaatttattcttttcacttttcagtgccttagtgatttgtggattgaaaaacaggaatatttttgataattgaaataacgttgtgtataatgataatccaaataataatgtatgtaaattatttgaaataatttcatatggctgtaatgattgaggaatgtagggtttaataaaagtttctacataaggttttaatgattccaatggatcatcgtattgataaacctctcgaaatgtatttatatagttcattactgagtataatctgtacgtcgaaagaaaagaaagtaaattgaagagatgataaacattggacataacatgttgtcaaaagacgtaagatttaccaaaatggaaatattcgctataaatggtctatttactacttaatacttattacttataattatacagttgaaacagtaacggtattgttctttcttgcaactgctgcaactttatcacctaatgataatgctaatccttgtcccttacttctaattctaacatgaccagtaattaatccttctttactcttttcaatacataaattagctaatgcatcttcaccgaaagttgatttagaatataaatttgctgataagaattgacaatcaccaataactgaaccaggtgttaaattagttcatatttgtactctttaataattcatccaagtattcctttaaacttgttaaattagaattaatactaattttattttcccattcaaattcattccacatcttcctaaattgagtttcagaacatgttgatggtttaatataatctaaaatatcaatatgaacatcacttaaaataacaattgtactatcatctgcatgttgtccatcatatacaatattaccaaatataacaccagtatctgcacttgaaactttaattgtagtttgaactctatggaatccatgtggtgcaatatttgcacttgttggtttatcaattacttttaaatctcctaatgcatgcaaattcaacacttaaattacgtaaagtagtagtagtttgattaacaattaaaacatctaatgtaacatcaaattgatgaactttaacatatgcttctgcatagacaggatcagagaaacctgttaattgaacaatcttatttaatcttgatgataaatcttcctttggattagttccttcttgaactgcatctaattctttatcattttcatcaacaattttaatatccttgttagtgaattgtctaaaagttattggttcatcaacattttcaatctttaaattattatttgcaatattagctgcattattattatcatttgctaaagtttcctcaacttgttgtttgaaaacttctaatgtatcatctaagaatgcttcttctaataatttaatatcagtttgaccttcacttaaaaatctaacacatgacataattctttcacttgaatcctcatcaattttctttttaacatatgatgtttcaccaactcttaaaattgaaaccataattaacattgcctctgcctttaatgcattaattaaatctttacgttctgaaactttatttaatcttaaaattaatttaactaatgttgatgataaaactgatgctaaatagaaatcaccatctaaaattaaacttctaattggtgtcttggatgatttattattagttgatttggtaatttcaggtgtatcaaatgcactttcagttgcataagtaccatcagctaaaatttttggaccagatggtgtagatgaagttgtattttcattagtttcatcatcattttcaataccatttaatctttgttcagatgataaaattggaatttctccaatactacttctaatatgtttccaagctaattgaatatcactctcttcaaaacaatattcacctaaaatccataatgaacttctataaactttaccagatttaacatttgataaagaaattaataatttattgatgatattagttcttaaatcaggatatttttcaataacttgtttaacaaatgtaataacttcattagctgaagtagtatttaattcaccaataaattctaataataaatcaacaacatttgcagcaatttcatgaaatttaattgcaattaaatgaattagcattaattaatgattgtctatattcagtgattttatcttcatttgaattagaagttttcaataattcctttttaaataatttaataacatcatcaacatttttatttgaaactaattttaaaccaatttcaattgctttatttctaacatcaactgaaggagttgataaaatttttaaaatatctaaacaaatatcatctaaaataccttcattatttaaatgtaattcattaattctttctaatgcaatcaatttaacatttatatcactttccttatttgctaattcaacaaatttagaagcagcatttttaattgaaattggtgaagaacttaaaacacttaaagtagttgcagcttcataagcaacagcagtattacttatatctaataatgaagtaataatttgtaaatattgagattttaaatcattaaatttaagtgcatcttttctaataaattcaataattgctaattgaattaaaggatctaatgaatctaatggttgttcttgaatataagttaatgaagcttccctatttaaattacttaaacaaacgaaagcatttcttctacaagttgcatcactttcaatatttaagaaatcattaattaattcaggtgcatcaggtattaaatgttcactaactttaaaaattgaataaattgcgaaaactgcattttttctaacatatgcatgtctatgttcaagacaaactctacaatttggtactaaagtttctaataattctggttcctttaatttatttaaaaatcttaatgtattacctctaataaattcatttggatgttgtaaatctctttgaattgcattacaaactaaaatcatttcatgtcttaatttaccttcattatcatatttatcacaaatttcccaataaaaatataataattttttcaaatctttatttttaggatggcataacatatctaataatatgcattaataaatcaggcattgaatctgaattaatcattgtaattaaaatatttctcattgaaacaattttaggattcatcatcacctttctccaattgagttttaaactcattgatagtgaattttgatgaagtacttggttcatagatcaaagtgtaggcagcatccgacatgactacagttacttaatcgtaaaagaagataaaaacaactcaaattctagaagaaacaacatgcatgtaaatcaatcaaaacatgttgcaatttgaccattggccttgaaattgtccacgtatctcaaagtctcaaagtctcaaaattgttatattacgtaatattatacatacttatactactactactactaatcatcatcactgtcaggattggtgatgaatagcttcataccgtctccgtaatgatggtctaacactcataacactattaaaccttcccaattctccactgttattggtcattgcaccattactacgttgattggttattctcgcaaattgttcacttgctgctataactgcagcatctggatgaattggaaccttagttcgttgtccactatggatctttgtagcatcaggtaattctccatcatctatttcacttgctagcattctagtctttggtttgactgtaatatgtttatgagatcttaatctagttctaaataattgttgtgatggaatttttctatgtgatatactaccattttgtctaatagcaattggtaatacttgtaatgatggtttagtagtaatagtcgttttacgtcccttggttcgtaagttctcaatatatgtacatttctctcctttacgtgattcctcattactaattatcatttcatctccattgttaacagtattagaagtagtaacagcattagtaaaagatactggtgtttcaataggttcatttttgataccaccattggtaaataattcaggattagcagttgtctcagataatcctctacttcttctaccagttattgcaaaattaggtggtggtcttctatttcttgaattcatatttgtattccatcccgtaattggtactgcaggtgtaattatattagaatgttcaataggtttaacaactgcttcctctcttctatcatatgctgaaattatttgattatcatcaattggtaaatgttgattatctggtacgttattatctattacagattcaagatcaggtattggtgctgttttatattcttcttcatcaatcatattatcatatgcatattcactctcatcttcacctatacttggactaatagaattttcatcatcatcctcatcatcatcaccactcatcatcctcttcttcatcattattgacaactttcaaatgttctctaccaccaccgacaacgggagtcccagttgcatcaccactagtcattttctccaacacacctttagtaaacattgaattttgcctatataaatcaggtgaaccattgttttctccagaataaatactggcaggtttcggtgaaaattccaggaaatcatcctcagattgttcaatacttggactatctgaaatttccttatatctattataatttgatacctcaccgggcttcttcctctccagtatcatcactactatcttcattactatcatcctccacatactcatcattttcacttttaggaaaaaaatcatccatactattactctcttaattgatgttcaacaatattattagtctaattcatctacgagatcaaaatctctctgtggtgtagaatctttcacaacatattcagtatctgttggtgtaactacattttcatcagtttcatcaccagtaatatcctttggtggttcaataattaaatttttttcatcatagattatatcatcattattatcattatttaaatcatcataattactgaaaaaattagttgcactactatacctttgccaaccacctgttgaactattggttgaaacttcattaatttcattagattgatcaagttcatcattcgtattatcactggtatttatagttttaacaaatgattcaaatgaatcattcagtggcccaataaaatcttcttcattattgaattcttcaccacttataccattttcattaataccattttcaatattttccttaaatgatatgtaattgaaatcatcaccattgaagttatcttctgttggtgtgatattttcctgtgatagaattttctgtgatgtttgaatttcctgtggtggtacttcttttgatggtatttcctgtggtagcacttcttgagaactcgacattacactcttaacatcttcatttgatttcttcacagcttcaggaacatcataaaatatatctgatgaacttgaagcttcagatacatcagcagattttaatttcattgcaattggatgggctaattgttcttcactaacatttggttgtttagttgcaatatctttcagtttatcaatatattcatccagtgtttcaccttcaatttgtggtaaatcttttacttttatatacattccaggatcgttttcatcatcattattattattgtattcaatactttcatcaaatttactactgtctatattcagatcaattgtatgtctatcacttattggacttgcaatatatgaactattatcattagtttcctgtgtacttgcagttaaatcaaatgatttttcatgttctaattggaagttatccaacgcactggtaatttcttcaatactcgataatgttcttgaatgtttatgtacgttattattatgatcgtattcaacacttttattcgtaaacataacgtttttggatggatttaaacttcgtatttgtgataatggtaaattataattattattattattattattattattattattaataaaactattttcattaatcaaatttaatggagaaaacccactatctgaactttcatatgattctgttgctgaatgttttatagtttccacaggtgatttaggtttgtgctttattttcattttcattattttcattagtgtcaataactaatggtaacggaggtggtttacgtttcttcaataaatctgatctcttaatcgtacctgttgatttcaatccattattattattatcaaataatatagttgaaggtggataaattgatgatgaaactctattaatttcaggtaatgtagaattacttacatttctcaaattatcattaggataaacagatgatgaaagactagaattactaactaatctatcctttgaaggtgtagtttgagtactattcataccatatattcgtgatggtgtaatatctctcccattgggggacagtccattcttaataactggtgaaactggtgatgatataagttaatttagttttactattatttgataaatttgttaaactatgattagaatgtaccggtgatgaaattaatgaactatttatttgaactgtgtttctgttaggtctgtttttaggtaagggaataggtattttagagtaatcttcatgaactatcgattcattaggtattgtgaatgtaagtctctttgttttattatctgtagttgttttagacgaagtattctttgaagatgaagatgatcttgtatgtcctttcttgtttttggacgacgatgatgaagaatcactcgatttcccaaaaaagtctattattgatagcctcttcttcctattacttgacatggtaattgtaaaatggaaagaagaacaagtgttggtaaatattaataaaggtataatttccgccatgcatattgaaagtgaaatatttttgaaacactatgaaatcgcttaatatagtgatggacatacttgtataatgtttcttctttttatcttatctatatttctagttttatataataaaataagtaagtaaataggttagtaaataaataatatagtaatagtatcatatgattaacattccagatgctaaatcatttttaatttcataacataaatgttcatggctctctaaaatattagaacattctcataataaattcaaatgcagctaatgcagcagcatttgcagggaaacttcttaaaatacttggtacaaaacctcttgtaaaaccctttaaaccacctctttcattataaacatatttaacagcatctgaatattttttaaattttggattttcagcattatcaatcataataacatttttaacaacatcagctggataagcagttatccaaaagcaagttgcacttaaaccacctgaccaaaaattaattgcagatttacttaaattagtattttcattaaaataatttgttaaaatttcatatgacccccaccaaacaataaaatttgttctaaatatcattgttggtattaaacctttatataaagattttaaaccatctaatttccataatttaattgcacaatcaattggaccattataaattttactctttgcatcatattgaacttgtaatctagcctttaaagtttcaattggtgcagcaacaaatgaaactgtccaaccagataataaacctgcaaaacaatgtccaaataatggtaatttcttttcatcaggataaaaattttctttaacaaatcttctataaatatgtaatgaaccaagcataactgaatccatcataacccaaccaactaatggaggtgtaaaacctttatataaacctttaataccttcatttttcaaagttttcaaagtacaatctaatggacctgtaaaacgtccagttgaagtttgaagtctaactttaactgaatcaaatggatgtccaacagcatttttcataacacctgagaaaacaccagctataaaacctgcatatcttggcggtagttccttcttatcttctgtcattggtttggtagagaaaaggtacaatgactttagatgagtcaaatttatataattggtgaaatttttcaacatgaatttttcagtttggcgattccggtaccggagaggaagaccgattacattaatttcattaataattcattacgaggtatttatttacttatgatacaattctatatacatctatacgtattaagaaactaaaggatagtttcacccatagcacatctagcgattgataaacctgtattaacagtttctaaatgaacttgagcagatgatgataaagcaggattaacttcaacaatatctaaaccaactaaattacctgaatttgcaatttcttcaacaaggaataaaccttctcttaaagttaaaccacctctaacaggtgtaccagttgcagcagcatacattggatcaataccatcaacatcataacttaaatgaattggattttcaccatttggattaactgcctctaatgccatacgaacaacttcattaataccaaatttatcaacatgatacatactaaaagctttaatacctaaaatcttttaataattttttttcaccatcatcaacatctcttaaaccaatataagtaatttgatttggtttaacctttgttttcaattctttaatccaattaaaatgtggtggccaattttcagaatctaaacccattgcaaaagcaactggacaaccatgtaaattacctgattcagttgttgaaggggtattaatatcagcatgagcatcaacccaaacaataccaccatttggataagtattaatgaaagcagaaattgtagacataccaattgaatgatcaccaccaattgtaattgggaaagaatttttttcataagaagatttaacttcattataaattaatttacaacaatcactaccattgttggtcttttacaattattgtaaacatcattttcatcctttttcattttatcagtatccatttcagataatggattaacattttttaaattccaacctaatttttcaatatcttttaataaaccatatttaattaattgttcaggaccatcttcaacacctgatttaccttgaccaccagagaatggagcacttataacagttgcatttttatttggataaaatttatatgaaggttctgaaaaggacattatgttttcttgtttttactaagaaaggatatattgaataagtaataagaatgaaatatgggaatagagggggggtatttatagatgaaaaatgtgggaatagattgtaatacaaatgatgccgtgtaaattcaaattaaccgttaagtacaagtgaagatgtaataccttccattaagtataatttacatgtgtcaaaaaaatttgaattagggggaactatctctctctttttcttatcagtgatttggcggtaggtgatagcgagggagagaatgataggtttttttatgatggttttgggaaggtaatagcgatagtatagtatagtgtattacgtaatgctttttttcattttaattttaatttttattttaattggtagcagatttattgaataaaatcaattaattataaaataatgaacatacaataggaataatataaagataatacataaactaaagtaaactaatgagcaaaacggaaatctaatctactactacctgtatcagttgtatttttaatataatcatcttgttcctcagctgtcatttgactccatttttcatctttcttcttatttaaataccaataaaaatatttagtacctaataaaattgggaacattgctaatgctaaaccaaataatactgcattacctgtatgatataatggtttatcaggtgtacgataaatatttgatgcaataattgaacctgcttgaacaaacatattatataatgatgacgaaactgttctagttttaatactttgactatttcttgaacatgcactaaccatcattgcatgaatatatggataatcctaagcaaattgttaaaacaacatatgtaccccaatgattaacctaaactacctttccaaaatcttaaaactccaacacaaacaagctccccataatggttgaattaaacaaacaaggaaaatacttgaaacatgttcactaatataagttgttgataataacattataatttttaaaacattatatggaatacaaagtaaatttgtatggaaagtactaaatcccatttgtcttaataataatgtcatatatgctgcaattgtacttttctggaatatatgcaacaataccaattaaatacattggccataaatgccaatctgaaattgcttgataaatcatttttaaactcaaaccttgtctattatgcatatcaccctttgatggatcatttcttaaaactttattaacaataattttttcttcttccttcagtaaaccaatccatttcggattccatcttttctttgtttgaactggtgatggaaccataaataaaaatccacaaaatccaataaataatgtaattaaacccttcaattaaaaataaccatgcccaaccaggtttaccatgtacaccacccatatgtaagataccataagcaactaaataattaataatttgtgtaacatacattgcagtccaaaaaaatgataatctaattgataattcagatgctgtataaaaatatgataaccaaagaaccatatcagcaatgaaatccaccttcaaagatacctaataatgctctacaagcataaaaactatgtttaccatctaatttaaattgacataaagttataattgaccagcaacaaacttgaattggaatccaaatatcggaacctaattttttagaaattaattgtgaaggtaattcagcagctaagaaacaaacataaaaaattgtattacctgtattataatcattagttgttaattttaaatcttttaataaattatctgaaactgcttgagctaaattacttctatccatttgtaatgcagtgaaaaggaaacaagctaataaagtaacatgaaaatctaatttataagttaattttctttgttgtttctttgtccatctaaaagtttcatcaaatctaaaacgacattcatattttgcatcttcataaattgctaaatatttttccttaacaactggattaaggaaaggattatttgcagaatctggtgattcatttgattcatcaattgttaaatcatcatcactaatagattttaagtcagaataatgatgaatattttcatcttcaagttttaatgaagaatcattatcatgagagatgtcagattcgtgtgttgacatttttgttttctttgcttttgttattaattaaaagacaaaaattaaaacggaataagttaggcatttcaaatttcagaaaaatgaagtacttttcaagtctatttaagatgaaaaaactttctaagctcacttgtcaaaatggaaagtttactgaaccagaacaatattcattatcaagagatgataatgatccgttacaaccagatggcaaaatgataaaactccgaaaaaggaaaaaaaatttgaaaaaacttgaaaaaaatagcgaattttctgtcaaaatttggtaaattttattgtggcagcatcttgttgatctgtggttcctgaaggctgggaaactgtggtggtggtgatggtggtggctttgtgatatcatagtttgagttgttattatcttctaggaagttactatagagttagtactggaaaggtagtaggaagtagtatctaactctatgtaatcacctttcaatctagaatgagtaatagcaatagtaatagtaatagagaagattaaagaaacaaactgataaagaatctgtatattaacaataagtggaaaaattgtatcagcaatatttcattaatcccaccgatcaacaagtactaaaaataagcataaacttagggaatacgataaatcattaaataaatacaaaacaaagatatgagtaaaatacaaaaaagtgttaaaaaaagagtaaagcgattaacatcctatacatgagaaatcaattctcattagcaataacttcatcataatattcagctggtgaaagatttgtataataattagttttttttaatatttctccttttctaattcaggtgtccaattatcatattcttcttgactaccgattggtctttcaccaatactgttgtaactctaaatgcatgtctaatatctgatgaatcccaatcagttgttggtgtatgaataacagttctattatcccaaacaacaactgtattactatcccatgtcattctaacatgtgcatctaaacactgattcaatatgattaagtaaaaataataataaattatcactctcttcagtttttaaacctaaaattcttcttgaaaatgatttattaatatataaacatttcctctttaaaactggatgatatctaactaatggatgaatattagtcacttggatcttttctttcaataccaccagttaattttgcaaaatatgcttgatctttggatgtatgtaaaacttttaagtcatcgaattttttctttcataaatggtgataatctatcataagcttcaaacatatttataaattgtgtatcaccaccactttcactattttgtaacattgcaaataatgttaatccaggtggttgattttcataagtaacatcagaatgccaaccaatattatgtaatttatccttgaaaaatttttttttgttcattttcactacctcttctataaactaaatgaaattcaggatgatttaatggagcaccagaagttggatgaatatgtaatggaccaaaatatttcccccattctttaattttatcaaatgattgatgtttaaaatcttgatttctaaatgcaattacaccatgtttagaaactaataatgataaatcatccttttgtttatctgttaattcacttaattgtaatccatcaatttctaaacctaaatttggtgtaactctcttaaatttaacatcatcattaattttcaatgattcaaatgttggatctgcaaaatttcctctatcaatatgtttaaaaggttcaatattttcaaatgcgtgatcatgtttaatatcccaagttggtgcccattcagggaattcagttttagctaaatcttccatagagacagttaaaatacctgtctcagttttactatcactatcattgtggaaatgaattgcttcatcgtaattaatactacctaatgttgtcattttgtttggtgagttaagttaaaaaaagaagaaggtaaaataagcatacataatatactctaactaaatcaggatatgctaccagttttatagaatactgggaatataacataacaatttaagttaaaaacatctaattggataagataaacggttaccaaataaggaaattgagacaatgttaattgaatatagaaactgttgcaaatatacctaatcaagataagaaagttatagtttatagtttatatagagaggaaagccacatttaatacactcaagccacaatataatataatttctcacttatattttgaattaatttttttttgatttttgattttttcatgagataagagtgagaattactcttttaggtaattatagtatattgataaggattcaaaactctaatgactgatcaacatcaacatcaccagcttcgccagcttcacgtttttctcgtttctcacgtccctcttgttgaattaacttattaacatatttactgaaaatttcaatactctctttcaaacttgtattcttccaatcaaattcatcctctgtgaaaattttatttaaatttggtgcatcagtaaatggattaaattcttttaatttaggatcaaatgtaacacaaacattacctgtacctggatgaacacaaaatggtgattttaataaatgattcatttgtttagaaacttcaatatctaatcttggatataacattgttaaaatcatttctttcctccaatcaattatatcaaatgaattaattttcaaatttttataaatttctccaatatcaatccatttatcagtacttttcaaatttggttcattattccatttatttattaatgcgttacgtaatctcgaatcaggtattgtcatgattaaatctttatttgcatcaatattatcccatgtaccttgttcctttaaaattatttcaacaaattcattttttaaaatatctaatgatctttcaacatgtggatgataaggttttttcataccgaaaatacctttcttatttttattatttttaatattaagtatatctaaatattcaataaatgatcttctattttgttcctttaaatatcttatatttgaatcactaatccaacaatgaacacctcttctaccactgaaaacccaaattctattattaattccaaaatcttcaataattgcaatatcaataattttaattgcaattgaaataaatttccaacatttattacaaatagatgtacctttacaacaagttctaatttcatcataatctgttaaatcaatatcaattattaattctttactaattggtttcattaaatttttagaaacacttttacgatttttaggttcaattggataaattgcaccaatttcaaatcttgttggattaattgttacaacttttttcttaaattcattagaatcttgaaatgaattataacgttgataagcaccattttgatgttcaaatgcaaattctctatgtgtaaaatctgtatttggaatagggtgaatgatttaaccattggaaaattaaattaaatggtaggaaattatcataataatgacgcatatcactttctgatggtttgtatattttaattgtattattagtagtttcttccttcggtatttgattcgttatttccccattattttccatatccatattctttacctctactgtcattacttagtgttctgtgtgtatatatactctttgtataccttctattaaaactcgaaaggaataaagacttgatcaaataatccactgacgcgtaaagtgggaaaattttaaaatttttataaaaataagtagacgcgtcgggattacgtaatagttgtttttttcactttaaatttaccttatttcaccactacatgaattttattgtgggattattgataacagtttaatcttgggaatgataaaggaagtagagacagtttagtatagtacactgttatagatgagtagtggtaattcgaatgggtcactgaactctaaaaatatcaatttttcaaataatagtagtgtacccaaacacatgtctagcattaacaataattcatcaagttcaaatgattttatatcaagattaatgtcaagttctccatctaaaactacaattgctcataatacttcaccatctactgggtcaccgatctatttggcagaaacagggagacgacctagtggtacaatgtcaagaggaatgtcttatctttataataattcttttcttaatggtggtatgagtaataatagtaataataataataataataataataataatggacctgtgatatctcctaaaaattataacaataataacaataataataatcatgaatataatagtacgaatatagattcctcagtatcatcatcaaccaatatagaaatatccaatcaaaataaattttcacattctttactaccatcattacaaaatgaaccaagttttaatgaaactgaaagatcatatttccaatcatcaaatgaaattttagcatgtgataaatcatgggaaactcctaatttaattgcaattgcaactccacgaaatttacaattattaaaagtttctaatactgatataagtttagagactgaattagttatgaaacaaagtggtaaggcaaaaataggtactataagtgatttatcatttggtcatcaacaatatggtagatatttagcttcaagtacaattactggctcaattaatatttatcattttgatagaggtaatagaattaaaacttcattgattggtcataaaagagctgttaattcaattgattttaatagaatttcaccttatttacttttatcgggatctcaagatggtaaaatattaatttgggatttaagaacaagtaattcaaaacctcaaatgtcacttaatggtatggctgaagctgttagatgttgtaaatttaataataaaaagggtaatataatttcatcagttttcgattctggtgtaattgaaaaatgggatttaaggaaaaattcaacttgggagaaaagaattaatgcacattcaggtcctgctttaacaattgattggcatcctgaattagattatgtaattacaggtggtagagataaacaattacaagtttggaatttagattcaaatagtaatgatttgaaggaaccttgtcatacaatttatacatcagatccaatttttaaggcaaaatggtgtaaaggtagaggtaataattcaattttgaatactgatattgcaatttcattctttaataataattcaagtgttgaaatttggaatttaaatagaaaatttataccaaaatcagtattaaatggtcattcagctcaaataactcaaattttatggagaactccaaaacatttaattacatgttctaaagataaatcattaatacaatatgatgttttaaaggaaaaagaatttataaataatattaaaaatggttcattatgttggaatccaatacaagttaatgatttaacagttattaaacaggataagttccaatttcaaggtccatttaataaaaatagtagaaatgataatgttgttaaagaagaggaaattgaaggtgaaagtagaagtaatagttataatgatctcgaaacgtattatgaagggaaagaactagaaaatagagagaatgaagatattaaaataaattttaataataatattcatagcaatagtaatagtgatgataatatttacaaaaataatggagatgatgaaaattattttactaataataatcattataaatcacattcaatgttaatacataataataataatacttcatcaattacacctcctgatcatggaatgcaactttatgaaatgtcaaattcaacacataatgcattttcaccaacaatttcttcatcatttaaatttcatagacccacaattatgcaatcaagacaaccatcacaagttagaatattatcacataattatggaccaccaccatcatggattacaccaattcatttaccatcacccaataataatattgaaaaatttaagctcctttcaagtaattatataattaaagataataatattgatgatgtaaatagtatagttgaaatttgtgaatataatgcaatgattgccgcatttgttggatttttcagagattgtcaaacttggagaagtattaaaatgtcaattattttagataatgaagttaaagaagaggaagaaattgaaaataaattgttaaattttgcatttgataggaaaaattcttttagtcatagtgaaagtaatttaggtacatcttatggatcagagagtgatgttattaataatttaggtagtgaagtttctaataaatcttatgatgataaatcatttgataaatctaatagttttataaatgagaatgccgttgaagatgatgaaggagatacagaagataatgatttaactacaaaagataatgctgaaaatacaaataatttaattgatctggttgctacgaataatagtacacaaagtgatatttcccacacgaaaaatcaaattttagcagatgatctacttacacattctgaagattcaaagaataaaaatgaaccagtatctgttccaattgatattgataataaatttagaaacagattagcaagtaataatattcagaccatataggtactcatttactggatcttcagttgattttgatgatgaaaaatcgggatctccattatcattatctagttcaccattgatgaaaaaggactaggaagtagaataataatgtcacttacaagtaatgcaaatgatgatccatcatttcatgttagtcagagtttagacactagattaagtaaaacatcagatactaagagtcaacttacaagtattatgaaagagaataattccaataataaagaggaggccggatcacataagagtcaaagtgttaaagatcagaagtcagtaggtaatgacagtaagactaaattacagaagaaagttcatgaatatgttccatggaatcctagtgatatgattgagaaagcatgtcaatatagtaatgaaagaggggatataattacatgtgcatccttagcattattatttgctactaaatacccaaatgctattccagcagagactgctgaggaatggatatatgaataccatgaattattattaagaagtggatatttcaacaatgcagccactgttttacgaattgcatcggaaacatatgaaagtttcaaaaccattggacaaacaaagacatcagtgaaaaccctctgttgtcattgcaagaaaccattaataaatgaatcaagtaaggatagattgatgttaaaagaaggtagtcaatttggattttggtattgtgatagatgtcataagcaacaatctggatgttcatattgtggagaacctattaagggtaatattgtaacattgatgggatgtggacatggaggtcattttggatgtttccgatcatggtttgttgatcaaaatgagagggaatgtccactttgtggtaatccaagtgtaatgtaggtgtgtagtctatagattagattagataagataagataagagaatgtgtcaaaattaaggcagtgagggttttcttttattttaaattttaaattttaaattttatgagggcaaataattaatgctcagctgcggtggctgacctttctttaattgtattggttatttataccttcattcttcctttcttttggtcaagtagtggctgtttgagtgctttgggaccatctgttgactacaattgatacaattacaactactaattgatacaacttacaattaaaattacaatttaataaagaaaaactacacttacaatgagattaacttcaactttagcaatctcactttgtgcatcattgacatcatgtcaatgcaggtttaatttcacctgatgcaaattttaaacaacaattacaaaatcctttaaaccttgatggtgcattcgataaaattggtgataaaattaatgataaactcccagattctattaaaaaggcaaaatctgtcttagagaaaggcagctttagttacaggtcaaaaaattgaagaattagataattcaattattgaagcttggtcagaaatggaacttaaattcccaaatactgttcaaaatttacaattctcatctgaacctcaatttaaaatttctaagaaacctgataatttttgggatttccatgttgcaaatactgataaattcccagattataaaatgagagttaaaaaaactaatcctggtgaattaggtattgatcatactaaacaatattcaggttatttagatgttgaatctgaggataaacatttcttttattggtttttcgaaagtagaaatgatccaaaaaatgaccctgttgtcctttggttaaatggtggtccaggttgttcttcattaactggtttattctttgaattaggttcatctgcaattgatgaaaacttaaatccagtttataatccatattcttggaattcaaatgcttcagttattttcttagatcaacctgttaatgttggttattcatattcatcatggttcagtttctgatactgttgcagcaggtaaagatgtttatgcattccttgaattattcttccaacaattcccagaatataatggtttagatttccatattgctgcagaatcttatggtggtcattatgttccggttttcgcatctgaaatcttatctcatgctgatagatcatttaatttaacttctgtattaattggtaatggtttaactgatccattaactcaatatccagaatatgaagttatggcatgtaatggtgaagaatcaggttataaaccagtcttagatgaagcagaatgtgaaggtatgttagcaaatttaccaagatgtttatcatttattgaatcatgttatgaatcacaatctgttttctcatgtgttcctgcttcgaatttattgtaataatggtcaaattggtccttatcaaaaaactggtagaaatgtttatgatgttagaaaaatgtgtgaaggttcttcattatgttataaaggtttagaatatattgataaatatttaaatcaagatgttgttaaggagaaattaggtgctgaagttgatacttacgaatcatgtaattttgatgttaatagaaatttcttatttgcaggtgattggatgaaaccttatcataagaatgttattgatcttttagaaaaagaattacctgttttaatttatgcaggtgataaagattttatttgtaattggttaggtaataaagcttggactaatgcattagaatggtcaggtaaggaagatttcagtaatgctaagactgaaaaaatgttctctgatgatggtaaaactcaaattggtcaagttaaaaactttgattatttcacatttgctagaatgtttgatggtggtcatatggttccatatgatcaacctgaagcttcattagcaatgttaaacagatggcttgcaggtgattataaattaggtaccaaataggttagtacaattatttgaaataataccatcattcgttattcctttttatctatgtttttgtttctttatttatttattttatcatattttattttatttcggtgtcctcttatatctatttcctttttttcaaatttaacgtttaaaacgtttacctattaaataaaaatatctctaaaaaaacagattattacatttaatatcatacgaatactataaatacatttatctaaactcaggttttaatacccaacctttacgttccttatcccaactacagatacctttcaacatgtttctaacaacatcaacagttttagtatcactgaaatctatatcaagattttccaaaacatctgctgatttactgaaatttccttcaacaccagccatataattacttaattgtgtaaccaatgattctgaattagtcacaggtttccttaaagcatcagttttccgttttttaatactgtttaagatagaattcgatgacgaaacaataggtgaagctgatctacttatactagtatttttattcctagttatgttatttaatttgttttgttgaactattaatttaccagcggaaccatgtttacctgtccatgttggaacataaacttttgatttacttgttaattctcttgattttcttaatgcaagaatagcttcattagcaattttagttgcttcattttcaatttcaatttgactttgatttttctttggatcatgaatgttggttttattaattatatcatcatgttgaacagctgaatgaatacctgattttttcaaaatatcaaacattaaattagaattattttcattattattttcattgtttttaactctactatcatcatcatcaaacattgatttttctttaacatttgcatcatcaaatttttctaatcttgcaacaccagcttttttagttgcattaatgaaagtctttatcagattcctctaatttaccagattgattaatagtattaatattattatcaaatcttgatttaaatttagttttcctctttttaataccattaaatttagattcttcagtattaaataaatcagcagtttcagtaccttcaacatcatcatcacctaaagtaaataaatcagttgatatcagtcattttaaaaaatcttttctgttttggatcttttaaaattttgttagttaaaaattgtttgaaaatttgtctatgatatattttctcctcaattgaacctgccataattaatctataaattgaaacatcttgcttttgacctaatctccatgctctttctctggcttgcatatccgttgatggattccaatcaggatcaaatataataactcttgatgctcctgttaaattaacacctaaacctccaactttagtagttaataagaatacattaaatttaggatcattattaaattcatcaactaattcttgtctacgaataattggcgttgaaccatccattctcatataattatatttaatactatcttgattaataatttgtagcatttgttctaaaatatttaacatttgcttagtttgtgtgaatattagaattttcctcttctcagttgtccataattctaataatgcaataactacttgaagtttaccagattttgaagttaattcctccaatttaggtaaagttgtaatttttttacccttgacgcttaaatcaactaaatttggatgattacaaatttttctaagtatatcaatcccaaatagtgcatttcttttaccagataaaattttctttaaatcattcgaatcaataaatttttggtataatgttctttgttctgtagttaatttacaaaacaataccatttctgttttcttgggcaaatctctagcaacgtcagatttaagtcttcttaacaaatatggtgtaactaaatcttttaaaataactgcacatttataacctgcttgaacttgaacgttagtcgcattagcatatccacctaaattaattggaatacaaaattgtctttgaaaaattggaagtgtacctaaccttccagggtatataaaatcaaataaactccataattcaattaaattattttgaattggtgtacctgataagatgattctatttggtgttttcaattgtttacaagtaattgtaataaaactatcaggatttctaattttatgaccttcatcaaggactacatacccccaattaattggtaataaatattgtgcataaattctaacacctgcataagttgtaattataacatgcccatttttaactatattattaactaaatctcttacttttttattatcttttgttttcgttaatgtttttacattattatttgatttttcactatattcttcttcaaaatcagataaatcatcaaaatcagaaaaatcgtcgtcatcatcaatacctctctttttacttttacctttagttttctttttatcattcataccttcaccaattgaatgtaagataacagctctgaaaggaggccaccaacgatgaaattcatcacaccattgctttaaaacagtggcaggacaaacaatcaatatcggtccacttaattctttactataatgtaagccagctaagaacgatatcatttgaacagttttacccaatcccatttcatcaccaatgataccaccagtactttgactgtgtaattcagataaccattgaacacaagttttctgataatcaaataaacttgggaatatatcaccaggtaatttaaattttttatgcaatactgcatctttaacggttggatgaggtttgtaccattcatcaactaatggattatcaatatattcagggttatgttttttccttaacgtggatcgttcattaacccatttagatagtctttgttgataatatctctcattaccatcatctatttgagatgatgatgtttttgaagttattttcttggatgtttttttctttgatttagtaccgattgcatcatctatatcatcataaatgtaatcatcttcgtcatcatcgtaatctgaattaatttcatcataatcaattttaaaatcatcggaatttgaatcattagttagggtttttgaatgtgttatttcaatatccgaatcttcatcgttattcagttcattattatcagtgtttatacctggcattcctaagatttttatgtgatggtatttccactacatcttcattattgttattattgatatcattttcagttatgaatgaatttgctgtaccgaatgcggtaattttacctgtccttataagatattcatctctagtttcatcaggtaattgaacaggtccattatcagtagtagatgtatcaaaacttactaccatctttttcgatattggactccattttcaatttaatgtcttttattctagccttaatttcagtgtaagtcgtttaacgatgtaattaattcattttcctctaattcttcaatttgaacagataatctagttttctctgaaattttcaaattcccactatccaatttcctcttcaattgagcaagagcattactatactttgtatatttttcatttgcctttgcaagtcttttctcttcaatttgtaattcttttgatagaattgtcttatctgcatcaattgcaacctctctctctaaatgagattggtctactattttaatatctagtcctgcaagattgtccccactgtcattaccacttgaagaactcatttaattgtcctttttccagtctatagtatctaatcacctgaagattagaagaagaccttaagataatagaaaatgtcccaaagaggaaaaaaacgaaaaaatttgaaatttttcactgtggcttcaaatagaaactgaatttgaacttcatttctttataataagatcagtagaagggtatagataaggatagtagatcagagtagaatactagacaatgacaatcgagtgtagtttggaaaagaatagagtgcaagaacttgagcaattactcaaaccagcagttgatctaattatcaactatgtcaaagatatagataatggtaaaagagatattggtcctagatttgaaaatcctaaagatttatacaatatcttcgagttaaacaacttagggtcactttttgaacaatccgttcaaaccggttcagaagacccatcagtggagatattgcaagttttccaaaaaagtattaaacaactcaatttctacttggcatccgggtttcatggataagttatatgttggtacaaatcctattggtgtattatccgacttattactctccgttttgaacacaaactcacatgttttcacctgtttcacctgcattaagtgctattgaaaggaaagtttcacaaaaatatgcctcaatgtttggatttaacggtaaatatgcaggtggtttaacattcagtggtggttcatggtcaaatattactagtatgcaaattgctagaagtattaaatatccaaagacaaaaattgaaggtaataggtaatcataaatttgctatttataccagtgctcatagtcattatagtattgaaaaatctgctatcttattaggatttggagcaaattcagttttcaaaatcccagttaatgaaaatggtgaaatgtcaatggaatttttagaaaagagaatattgtcaactattgacgatggttatacaccattatatattaatgcaactgctggtacaaccgtttttggatcatttgatccatttactgaaatatcgaaaatttgttccaaatataatatttggtttcatattgatggttcatggggtggtaatgttatcttcagtgatattcataagaaaagattagaaggatgtcaattagctgattcaattactgttagtcctcataaaatgttaggagttccaactacttgttcatttttacttttaccagatgagagaatctttacacaatcaaattcattaaatgctccataccttttccataattcaattgactgatgatgaaaattttgatctggctaatggtacaatgggatgtggtcgtagagctgattctttgaaaatgtatctttcatggctatactatggtaatgaaggttttgcaaagagaatcaatcattcatatgaaattgccaactattttgtctctaaattgaataatatcacaggttttaaacttgtaaacaatttcccaataccttgtttacaagtttgtttctattataatcctaaacctgatgttaaactgtcaggtaatgaaaatactgcattaactaggaaaatagcaattgcattacataaaagtggtgaatttcttattgattatgcaccaaatcctaatgatagtataacaggtgaagataatggagaattctttagatgtgtctttaattcaccaaatatcaccagtgatcttgtagataaacttgtcaatcatattgtagaacttgcaaataatttgtaataatgttatttaatactatatacagttatataaacgttagattagatactttcgttatttattgtttcctattagaatctaatgtctttaatttcttcatttcttcccttggatcaaaatcaccatctgataacttcttatattgttcatcaaacttacccgtactcaaagtaccattacctcttatacgtttcctcatatcaacaatacctctcttacattcaagaaatgttgctagttgtgccttacagagatctggtaagtctttacttaattcggggttattaatacactctttaggggtatttctttcaatcatcacacatggagatctttgtaaacatattgccacttgtttgagctggtccttacaacttgcaaccatctatttgctgtctctagagaaggaaatagaagagaaagagtgtgtaccaagagttaagataaaattacttccatgtcattgagaattttcattatggtgttacctatatcaggatatctttatatatgatgaaatgtcatttatctactgaataaccacttaatacaccatataacaggtcaatgactttgaatttcttgccaggacagcccaataataccccagactcatgttgttttgtcaattggaatacaatccagatcttgacttacacttctggtaataatttggttattttaactaaaaattcattacatttacaaacactatatctaccatcagattcatttgccgttgatgttaatcgtgtcaatggtaaaattgctattgcaataaaggatgaagttcatatttattcaccagaagtttctaattattataatttcaatttccatggtcgtaaagatttaagtgaattgaagattcaatggtcattggaacataaaattaccaacgataaccataacgaaaatgatattataaattgtctatgttggtcagattatacacaagttgcagattcagattcagatgatgctcaaatatttgatttaccatcagaatttaattcaaaaacatcatgtgaacttataacaggttcgaataattctctaaaaatgcaccaaatgtcatatgttgcagatccaaacactccagataataaaataatgaaatgttcattgatgtggtataaacctcagcccaatcccatttataaagtgaaaatatcaccaaattcaacttgtattgctagtatagggtattatgataaaaatgttaaattatggcatagagttggatttactaatgaatattgtgattttgaattacattatttatcacaggaaacttatgttactgatcttatttggaaaagtcaaatgaatgaatctgaccctaataactcgtcatcgattagttctgttcaaattaccccttcaaatagttttatattgaaaccttccaatagtataattaaaaatgatgtaagattattaactgaaaacaattcaattcattcaaatattaaaagcgaacatcaacataacgttttatacattgtcacagctgattcaaggcttagagtatattcaacttatagactagatacaggatttgatattttctattcaggctcattagatttatttgaaaacgacacatttaagaaatcaaaaggtataactaaatcgataacatttatagataacccatatttagaacttggtcttgaaaaaatgttatcagatttagagaatgaacatgattatacggaattgaatcattcaatgcgtaaacagacaaagatgatggaatttataaaatctaaatctgaattatgcatggttattggaagtgatggagaaattgatttatatggattcacaaatttatgttcagttgtcccatctaagatgattacatataaaattgataaattatttcataataatgaattctataaagttaatttatttcttggtaaatattgcttaccttcaattcctgaaaatttcttactgaaatcaattcaaattgatcattattctccaaatttagcattatcattagtaattcatgacttatttcataatacaattagagaaattggatttacatttaatgaaatctttaattttgaaaaatccactcaccaatcaaataaaaaaatacttaaaacaataactagaaagattggttgtttgaatcaaaaatttacaggtcataataaatcagtcaggaaactgattagatcaagtgatggttcatcaattttatcacttactagatttacagaaaattatctttggatacctatttacctatcagatgataaaacaacattaactaaaaagtccacaattataactaaaactccagtcattgatgcagttatttggaataggggacattttgttttcacaatcgttgataatcatttaattgctttccatacatctactagcaatcaacataatcttgtatctgaagaagttcgcaaaatagaaatcaataccgatacaccacctgaatgtttatttatattacctgaatcaaacaaattaaattgccatttgatcttaatttacaaaactggtgtatgtaaatcatttgagtttgatatcaaggtccttgatagtaattctacagttaaaggacattttttacattgtgaatttggtaatattacttgttcactaactgaatgtatgattgatgatttgagaatactggataaggaagatttacatattatttcaccaataaatcctgttggctgggggaagaatattgataatattggacgtgatgtacttgcaactgtttcatccactggtcgtgtttctatttattacgtaacatttacagatgatgataacaatgatttaaataatcattcaacaattaaatggcatttaaaggattcatttaaaacaggtatctccaattgctcatttatttctggatcatcaattaataaaatggcaataattgatgaaagtaaacaaaaattaagtatttgggatatgaaattaggtataatggattattttgaaatttttgaaaatgaaattgttaaagatttagattggacatcaactacctacggacaaggtattttagcagttggatttaaatcacactcattattatttacacaattacgttatgattataccaataaaattccatcatttactaaaattaagaaaattgacatttcagatgaaacaacacatcaaattggtgattccatatggatgagtaatggattgttagtaattggtacaggtaatcaattatatttaagtgataaaaaacttgattttaagaatgatccaataactaagaaagtagttggtagtttagaaattatgagtaatgatttattacatttatcatctgcattaaatggcccacttccattatatcatccacaatttataattcaattattatttggtgaaagacgtaatttaattaataaaatattgactaaattatcaaaagttttaagagaaatcgatttaggacaaagaagggaagatgattttgacttaggtattagtaaggaagaaattatgctgggggataatagtacagatgatgatgataatgaagatgagaagttttcttcagaatgtgctgatatactaatagaaaaactgacaaagataagattaccatttttaactggacatcaacagataacattaacacatactgtctctattatgaaggatattttattgaaatattttaatgtattagatttcaatggactaaaattttatttaggtatgaaacttttcaaagttaatcaaaccaaggaatcagcaattaatgctattgaaactattagatttcgtgatattttatttgcgttacattccgataatagagatatattatttgatattgttaatgaacaatctaattctaaaattgattgggttaatgcaaaacgatatttattaccattatggttagataataaaaaattacagcaaactatggaaattattgcagctaatgaatttattaaatttcaagatttaaataatggtaataaagatccatcagtttgttcaatattttatttagcattacataaaaagaaagttttattaggattatggaagaattctattggtcatagagagagggaaaaaatggttaaatttttaagtaatgattttaaagaaaagagatggaaatcagctgcacttaagaatgcatatgttttacttggtaaacatagatataatgatgcggcaacatttttccttcttgcagattcacctaaggatgcagttaatgttattatgagacaaatgaatgatttaccattagcaattgcagtttctagatgttatgaagattgtgattatggtgattcaatgagaagtattttagagagaggtattttaaaagatgctattattaataatgatagatggagattaagttgggttttctggattttgaaaaataaatcaaaatctgctcaagcattaattaaaccacttacattaattaaggatgatttaattaaattattaccaaatttccaatgtcctgatttatctaatgttataagaacaaattttactgaggatccagttttacttattttatacaattcattaaggaaaagaaatgttttatattatgaaggtattaaggaaatggattgtaaatatgaattttcatttgttatgaaatcttcaacaatgtatttcaaaatgggttgtgattggttaggtttatatttaattaaaaactggaaattttctgaagttgattcagttaagggtgttaaagtaaaggaaattgaagaagttaaggaagttagaaagaaacctggtgatatacttgctaaatttatgaatggttcaagcaatggttctaaaagttccaaagtaccaagtatgttagatgaatttcaaccaaagagtattttggatgatttccaacctaagacgtatcaacgtagaagtatgttggatgatttccaacctaagacgtctcaacctagaagtatgttggatgatttccaacctaagacgtctcaacctagaagtatgttggatgatttccaggctattcctacacctaaaccgaaaagtatgcttgatgatttccaacctcaaaatacagttcaacctaaaagtatgttagacgacttcaccaaaccaactgaacctaaaaaaaccactattgctaaaaaatcacctgtagccaatatgttagataattggatgtaaaataagataaatacattttataatcataatcattaaacgttaacaaaattatataaaaatacagaaaaacatatacagacattaaagttaataagttttagcggaatcgaagaaagaatcaaagaaggataatgattgaggagcatgatctaacaattcattaccattatttataattgttttagttttttcaacaattggagatttttgaggtaatgaattgaaaatatttgaaagtgttgataaagtatttaaaagtgaaattttttcattattattaaaatttaaaaagaaattaaatcttttgataaatgcaatacattgaaataatgatttaatactattaatgaaaactatgaaaactggagcttttttcaaatgttgttcaaaatttgatttattaataaatttaataattaatttttcacttttaaaagaaacttcatgtaaaatatcattaaataggtgaattgcattaggatttatatttgaacctgatttatcttcctttaattgaatatcaaataatgaactaaatttaattaaaacagtttgataaagaagagttgttgtatttgtaacaacaatattcatcagtggttcagttgtcatatcaaagaaaattaaattactatgcatactttgaaaatttttctttaattcatcaacttttgatctaattgaattaatacttgaatttgattttaaagttttcaattcaaccatatttaaaaacattttacaccatttaataatattttctgaaattgtaagtaataaaattttagaacttgaagaattcatatcaattaaaacttgattatcatcaagtttcctcattgcatcatgaaggaaataacttgtttcagttattagaattatttatatttaaatcatttttagaaaaatatgcttcacctgaatgattattatttaataattctgatgatgatgaattattatcaatttttttttcattagaatcgttttgatttggtatttttcttattactattattattattattattatcatgtggtgaatctttgggattatctaaaaatgtagttggtgaaggtaatttagtgaaaataacagataaactatccaatgaaagtgcacatggtaaaccagtaactaatgaagaccatttatcaattgcataaacttcccataaaactcttcttctctcttcagccaaatgggatttctggatccaaataatcatccttcaagtaaattattagttgcctctaatcctgaagataaagtaaaatttctaaagaaaatagctggtgtaacccaaagttgtaggtgataaatcaatttgatcataaccaaacatttgagttaatctaattgatgaagaaacagttaatgcagctctcatttctctacctgaaaggaattcgaattgtgattttaaacataatgcatgtaaataagttaatatatcagcatgaaatgaatctctaatacattcccaataagtatttaattgtaataaagcagtttcatataatttatcaactaaatgttgatattcatctaaataaaatgcactaagtgtccaaatcatataagaataatggagaattgaatgaggatctttagcaaatgtatttcgatatcttattgatgaatatgtaaatatacgtgtatttgaattaaaataaaaattatgaaatctatcaacatcattcattgttaagtttaaattagcaagaaacggtggaatatctgtagtattagttgttgttattgatgatgatgatgtactgttagtgttaagtatatgatttatatcatttcttaatgatgttattgttgattgagattgaatattcaattgtgatttcttttttggcccagtctttttatgttgtaaataaacacatgggatatcttttaaattacaacgattacatttaggttgagatttatcacatttaagtttcttctcacgacaattaagacatgcaatgttattagatgcaggcattgttaataaaggaagaagaattaagtataatgaaatggtaaaaaatactttgtgcatttgataaattatttatagtcatgatgtaatgtcatcatttttcattttattggttagttatataatataagtaatgattgtatatacagaaataagagtaagtaaataaataaatatcctaacggatgtttaataataaagaatttgaacttgaagatgaagaatctggagaacctgcattacttggtaaataagcaacatttggagaatttgccaaagttgaagcaatttcctttgaagcttctaatcttctaataagtaataaaccatcaccagctttagataatgcttttgagatatgatcagcagcttcagcttcaccttcagctctaataactgcagctttacgttcttgatctgctttatcaactaaaaatttagctctttcagcttcttgttgagcaacttgtttacgttcaacagctttagtaaattcaataccgaatgtcatatgagtaattgaaacatcctctaatttaatattgaattgatttgctcttaattctaattcattacgaatacgatttgagacaatttctctcatattaattaattcagctgcatcgaattgtgcaacaattgatttaagtacttcattaccaattgaaggtaaaactctttcatcataatctaaacctaaattttgataaatttgaggtaatttaatcacatcaggtctatgtaaaactctaagagtaattgaaacattttgtaaatcttttgaacctgtagttgttgtaattgttcttggtctagttttaacatcgaaaataattggtctctgtaaccaaggaattgcaaaattcataccttcaccaactactgattgtttaataccttgaaatctatcgaaaataactgctctttcaccacctttaacatcatagagggaaacatcggcaatgaggatagcagcagatactggtaatgctaatttagagattatattagctaaacgggacatcgttgtataaggaagaatgtagtggcaaatagtagaaatacttacagtcccactatataataaaggtaaaacttccaaaatttgaaaaatattaaacttacgtaatctattctatataatatactattaaagacttactcttcttctttctttgacagatcatggagattgagaaggttgtcaatctctttaggggtgtagagcttgatagttggtttgttggtattactctgtagagataatgatgcaagttcaagtttatctgcagagaggtgagtattatcggatgtctttgataagacttttaaagctatctttaaagcatcatcaagtgtgatatcattatgagaatctgttggattagcatttaattcttgctttaacaatgtttgaacacttgaagaattttcaccaattgaagttgccaaccaaccagaataattaccagaaggatttgaagaatataattggaaaccatttaatgaatcataaccagcaaataaaaatgaaacaccgaaaggacgtaaaccaccaaattgggtataaccttgtttaaaatcacaaactttattaaccacttgcattgtatttggtaatttattataaatttttaaatattgttgacaatcatttctcatacgatcaattaaaatttctgcatcagctgttaaacctgcaactgaaacaattgtttgatcattaattttataaattttttcactatttgaagatgattctaataattttgaaataattttacgttcagctaataaaactataccttccttaggtgagagtatagctaaagttgtacctgcatgagcaattgcctcaagggcgtattccacttgatataatctcccctcaggagagaatatagttgttctactatcatatcttctactcatattgtctactaaaagaaggagtgtagtattaagatagagtatttgcccttgtaaagttaaagaattgaattgaattttaattttaattttgatttcctcactataataatcctactgccatctctttctttcttttaggagagtgtatgacaatgaacaaggcattgagggctagattaccgggtactgtcactgcagttagtgatataatggagagtatagacactactgaagagagtgataccagtagtatacacagtatacacagtatagagactacacatactaatattgtagtcccaccgacgcaggctcatccacctaggccttctaatacgcgaattgccctggtggtggcaattttaatgctcagctgctttccaaagaacctccttctgcgttcactgctctcttctctaaggagattatacaaggtatagtgtataatagtgtatagaataactatgtcaacagatttatatcctatagcattacttatggatgaacttagacacgatgatgtcgcatctagagttcaatcaatgaatagattagatacaattgcaattgctcttggtccaattcgtacaagggaagaattattacctttccttgaagatgtaatcccagaggatgaagatgaagttattgcaattgctgcctctaaattaaaagattttataccctttattggtggtgttcaatttgctaatttattattaccccttttagaaaaaatttcagcttgtgaggaaccaattgttagagataatgcagttgattcattaaataatatatcattacaattatcaattgatcaaattaaggaaaattttatacctttaattataagattatctaaagaaagatggttttcacttcatatagctgcaactggtttattttatacggttttaccaagattaaatgattcaattgaagatgaatttaatttaaaaattaaattagttcaattatattatgatttaattattgatgattctccaatggttagaaaagctgctgcatcaaatttacctaaaattatttcatcacttaatgaaccaattaatgaacaagtttggaatttatttttgcaaatgtataaatctttaatcaatgataatcaagattctgttaaatttttatcaattgatgtccttattgaaatcttatcttattataataaacttaataactccactgaagataccacctcaactacagattcaattaatgaacttttcgattcattaatttcaataatatcagatccaagttggagagttagatatatgattgcagataaatttaatttattatcagataattttaataatgattcttttacattaaaattattaccacattttatttcactcctaaaggataatgaatcagaagttagaaaggcaatttctaaacaattacctgaattttcatctaaaattaatttaattaacccttcattattaattgaacaaatcttaccaatagttaatcaattaagtaatgatgaatcagaaaatgttagagctgcattagcttcaaaaattagtaatttatctccaattttaggtaaggaaagaacaattgatttccttttaccaattttcattgaaatgcttaaggatgaatttagtgatgttagattaaatataatttctaatttagaaattgttaataatgtaattggtattgaattattaaatgaaagtttaatgcctgcaattacttcattatcaaatgataaattatggagagttagattagcaattattgaacaaatcccattattagcacaacaattaggtatatcatttttcgataaatcattaggacaactttgtatggattggctttgggatccagtttattcaattagaaatgcagctgttgaaaatttatcaattttatgtaaattatttggtaatgaatggagtaaaaatcaagttattgataaaattttacaaaaaaaggaaactcaagaatttaataattttatttgtagaattacatgtttatttacatttgttaaattaattgatattgttaataatgaattggtagaaaattatatttatccatttattaaagatttaattaatgataatgtaccaaatattagatttaatgttgctaaatcaatgtttaaatttgcaaatcattttaaagaaaataatcaattaaatataataaataatgaaattataccaatattagaaaatttattaaataatgatgaagatgatgatgtacgttattttgcaaatgaaaatctaacaaaaataaatagtttataaataataaataataaataacaatgtatacaatctttactttactttcttttaactgcctttacaacaattggaattaaacctgcagttgggataatataaggtctatgaccaacagccaataagattgattttacttgacctgaatgtgaagatgaataaacaactaaatcatcattatatttatcatcaaatacattttgtaagaatctattacttctaatagttaattctccaacactttctctccaatcagatctatacaattcatcattttctgtaaatccatcttcaaatgtaaacccccaaccattaagtctttcctctataactttcttacttgatctttcatcacatgtatgttcaccaatagtttctcttaaattttccataattaaaggtttaagacctttatcactatttttaaacataagtatattattcattgacagatacaatgtttgacaacttcttgtaaatggtgaactaaataatttagtaggtaatggcataccattattaatttcttttattaatgtttcattaataaatttagcctgtgattcacccaatggagtaaggaatggatcaggaccataattgacaacttcaccgttaggtaatttaacatcaccgtattgatgagaataatatgaatcccataatggtctaccaactattgataatgtataattatgatatccttgaccatgtcttgcacagaaaattaatttatatttagtatctgcaggggaattagagttaagtttttgaagttccaattaggagacttttcccatgaaggtttatttaaacctaaatgatcatttaatgaatcataagttgtatcatcagtgtctaatgatgattgtttgaaaaatccaggtacgatttcaaaatcatagataggggattcaagtgataataactctctgtacttctctacttccacttctggaactatagaatctgttttatcttcgatattaggtttaattaatgacatttaccaaaaggaaagagtagtaaaggaggattatatggaaaagcaatgtccgatctctctatttataccaaacgctcttcctaaaaaggttaaaggtaaatactttcatgtttgttatgttattcatctattagttgtttcttcttagaacagaccaaatgtcatttacattacctgaggtaccatcatatcagacatcacgtaggaggtttagaccaacacttgaaaataatggtacagtaaataccaatacaccatcatctcatagtgaattaagagctcatgctgagagttcattaggtacaggtgcattagctaaagcaattaaattaccaccaggagaggatattaatgaatggttagcagttgcaattgttgatatttataatcatactaatatgctttatggatcaattacaaatttttgttccccaacaacttgtccaagaatgattgcaacatcagaatatgaatatagatggcaagatccattacatagaaatggtcaacctccaataccattaagtgcacctgcatatgttgaaactttaatgaattgggttcaaacatttttagatgatgaatcaattttcccaacaaagatgggtgtaccatttccaaagcaatttattgcattatgtagaacaattttaagaagattaattagaattcatgcacatttattttgtcatcatggtgatgcattaactgcattggggattcaaattcatttagctacttcattaaaacatgcagctttaattggtaaagaatttcaattattaaatgaatcagattttggtccattaagtgaaattgttaataatttattacaagagtgatataaaagattacatattacctttccaacaacataaaataccctttattctattatctttattatttaaataaattacttgaacttttttataattatttaaacttgttgctaatttaatttgatttaaattactattctttggtaagaatagataaatgttgggggagaattgtttcatgtattgtaaatgtttactaagtccacatggtaaaagcattgtttctaaatcatagatttttgttttaatatattcaggtccaccccatggtggtgatccaaatacacaatcaattttcatatccttgagttgattaacagatgtaccttcattaatacaattccaatcaatttctaataatttcaatctttcctcgatgtcttcaccatgataaacaattgaattattccttgtacattgtaaatgagttgggttaatatcaactccaattacattacaattaaggtttaaaaattgtacaatattaccaccaccaccacagaatgtatccagtattgtaaacttattgttgaattgtttacctatatatttggcaatatacttggatatattctccggtgtaacactaaaccataattctttggttaataatataccttcatcatatttagtgaaaagtttatgtctttgtaaccaatattttttcatcataccttgaaattgtgatttattattgaaaatagtattaagatcatcattattatatgaatcatcaactttacgttttttgttaggaggtagttgattgtgatctctttcgtttggtcatggtacaaaaggaaagagttttactaaataaagaaaaaaaaattatgctgttagtgtacaataaatataatataaaaagactgtttatacaattaatccaccctttttatcttttttaattgaattttcataatgtgattgaataatcttgtagataaatcctgcaaataggtaaactgctaatgcagaaagggaaatcaataggaaaatcccccaaattgcagtttcatccttttcatttgaagttgcacatgcatgaacagttctaacttcaaagaaataagaacaattattcattgaacctaaataattaactcttgccttactcatcatttctctatcacatttaaatgtaaggagggtgtttttagtatattcagtgccatcacatttatcaccatttgtatattcaagtactaaattcatacctctaaattttaaatttgatgaaattgaaccaattgaaactttattaccatctttatttgtataataacctgcaatatttgatttatttgatgaatcaataaaatctaatggtgttaaattattaaggttcttaattggagttgaacaaataccaattgaaaaattatgtccataatcgaaacctttactattccaagcttgaatttcattatccaataatgatgataattctcttaaatcatagaattgattagttaatggattagtaattgtacatggttgtattatgtcttgtatgatattatcatcatcatcatcatctttattattttcatcaattagtaaattattacttgtatcctttaatacttgcaaatcatgttgaatttcctgtgataatttattatcaggtgatatgctattaagaagtaggagtaatagtataatagatactataatgtatagtattctcctatggaaaagatgtaagatcattggttaaaagaaggtatgattggttaaagtgagaaaatttatcccttattagatactgttgtttcttttagcagattcattgcttgtagtatgatgttggtaagtaagtatagtagtggtaatataattagtagtgtatgtagtgataagtgtattacacctgtgttagttaatgggattattctaaatagtaatagtaatggtattgatgagaataacataggattaaaatcatttaataataaactagccaatagtagaataagtagtaatcatagtgtacagtacttatcaggggttacaactagttcaaatacaacaattgcattcccaattgagtgaaatatcaataaagtctgactcaatccatggaaaggaagtgtttattaaagacgatattgatgatggattagatgggatattaaagaaggctaaggagatgatgggtgaagaggagtttcatgagttggtagaatgtaatgagtataatacagtaagggataagatagtattggatacaatacgtagtgatgaaattgatttagatagtttagtaagtaatggtataagtgtattgggggatagtgaaagagatagattagagagggtggtatggtatgatgttgatgatgatagtatagttacagatacagatacagtgttgtactgtccctatagaaagacctacagcatcaataagacctgttacttatagaaagagagattatataaggaaatggtttaaatggtggtgagtcattatgtatttccttatgttcttcttctttcttttacttcttcttcttcttcttcttcttttctttctgtatcctatagtgtaatgactacatataagaaagcgggagttttaggtgccacaggttctgttggtcaacgttttatcttactattggctaaccatccacaatttaaattacatgcaattggtgcaagtaaaagatcagctggtaaaaagtatgttgatgcatgtacttggaaacaaactgatttaatgccatcatcagttgaagatttaattgttagtgaatgtacatatgattctttcaaagattgtgatgttgtattttcaggtttagatgctgatgttgcaggtgatgttgaaaaatcttttgttgataatggatttagttgttatttctaatgcaaaaaattatagaagagatgaaaatgttccattaattgtccccattgctaattctgaacatttacaaatgattgaaaatagattaaagaataatccagatactaaaggtttccaaatttgtatctctaattgttcaactgcaggtttagttgcaccattaaaaccattagttgataaatttggtccattacaatttgtttcaacaactacattacaagcaatttcaggtgcaggtttctcaccaggtgtttcaggtattgacgttttagataatattgtaccttatatctctggtgaagaagataaaattgaatgggaagcaaagaaaattttaggttcactaaacaatgatgcaactcaatttattcttgatgatgaattaaaagtttcagctcaatgtaatagagttgcagtttcagatggtcatacagaatgtgtttcattcaaatttaaaaatcaacctgcaccttcattaaatgaaattaaaacttgtcttagggattatatctgtgaagctaaattacttaattgtcattcagcacctgaacatgcaattcatgtcttggaacaattagatagaccacaaccaagattagatagaaatagagattcaggttatggtgttagtgttggtagaattagacctgatccaatctttgattataaaatggttatcctaagtcataatactattattggagcagcaggttcaggtgtccttattgcagaactgttacttgcaaagaatcttatctaatagtttataatcttaatatactctttataaaagacctcacttaataattttaaatttttactatgtactgtataatcaaccctttattcaatacatctttcttttaaacttctattgatatatccattttacatgccatatacacctccttcgagaagtttatctaagagtaaatctcttaaatcagataattcttcaaattcaatacgacaaaatgctttctattcattaatgaataatcaaattgattcaaagagtaataataatagtaaattttatttaatggatgataattcaaattcttgtgaaagtttagatactccattaacaatggataataatatgaacaataatatgaacaatttaatacaatttacaacagaatcttcacaatcttattcttatacacctgtttctataaattcattaactatgagattaaatgttttaaaaagatctttagaaatcttacttgaaaatccagattggcttaatagttcaattgaatcattccctgattataatattcatttaaattctaattttaataccaacaataataatattcataataatcttttaaaattagataaaaatatttcaagttcaactttacaaactttactatataatactattaatatgaaagaacctaatagcatttcatcatctccattatctgaatcttcctctgattccgactctaattctaatttaaatgattcaacaataactgaattaatggatatacttaaacttttaaaagattatgatcaaaataatattgatgatatagaggaaaaagtattaaatttacataatttatcattatctaatatttcatcatcttcaaatgatagaattaaccttttaaaaattaaaattttacatgctttagcaactcctttcatagaacaaaataattatactactactaataataatctccctggactaactaatacaacaacttcaacattaggcctctcatcattaaataatacttctaattcaaacacaagacaatatcatgcaacatcaaatgctaaaactaaatctccaaaagcagttttcacagtttcattaaattccccctgggatttacttaatgctaatgatttaggtttattaatgtttggtttaagtaaatcatcattatgtaaaatgaaattaatggatttaattgctccaagatcaagagatttagtatttgatagactttatagaaataaatcattgattatgtcaggtgaaataattgcagttaaaagatataatggattagcttggacttcattatgggcaaagaggaaaaatgaatttattatattaatttttgaacaagttgcatgtgaaacaattgatattataattaaaagagataatgaattaaaaaatgaattttatgtttctgatttaattaaacaaaataattcactttatgaaaaaaatttgaaaaattttaaattatcaacatttttaccttcattatctaatattttaaaaaataattataaagattcatcattaaataataatgatataacaagttctaaagattcaaatttaattaataatttaagatattttacattgaaaaatttaaataataattttgtaccctgtgcaattacaagtgaatatcttaatattgatgatgaaattactaaatcttatattagagttaatttacattcattaccatatattgcaggttcattcttaatttcatcaaaagattatacaattaaaagttttaatgaagcaattgcaaaaaatttatttggtacatcagaattgaaaaatcaatcaattgatttaattttaccagattttacaaatttattaaatttagcattaattgaaaatccaaatttattaaatcaagatggattagttttacctgaacattattttagaaaattaaattcttggaaaattggcaaaaatgataaggaaagagaagaaattttcattaattcaaaaggtattaatggtaaacatattgatggtaatttaattaatgttgatattcaattacatatatcaaataataattattttttactttggattacattttgtcgttcattctctaataaagtttatcatattgaaaaattagtaaatcatgaaattatacctacaattgaaattaataaacctgattatgatgaaaatgttggaaatatcgggtcgaaaccaagtataagatttgaggataaattagatattcatcattttaatgatgaatcattaagtaatagttcattaccatcacaattaaaattatttgaaaatagagatggaaataatttagatacaagttcacaaggttcatcatcaagtaatttaagtagatcaagtagtattaaaacaattaatcaatcaaatatttcatcaccaacaacacctaaaataaatagaactaattcattggttaaaatgaattcttcattatcattatcattatcatcgatttcaaaggaaaaagaagaagagaaggaacaggaaccaatggaaccgatggaaccaatagaaccacctaggattaatagaactgattcattttgtctgagatcaccagttacatgtcaagaacatttagatagggagaataaagaattagaatatttaaaacaaaattcagctaatttccccaaagtaattggtaaggagaaaagaagtaaaaagtttacagattttgaaatattgaaaaatttaggtcaaggagcatatggtaaagttgtatttgcacaatataagaaagattcattatatagagattgtgttaaggcaattttcaaagagagaatattagttgatacttgggtacgtgataaatcattaggtacagttccaagtgaaattcaaattttatatgcattaaataaattcccacatgctaatataatgagaataattgatttctttgaagatgatcaatgttattatttagagacaatgcaacatggtaaaaataatggagcagttgatttatatgatataattgaaattaagagagatatgattgaatatgaggcaaaatatatttatttccaaattgttgcagcattaaatcatatgcatattaatggaattgttcatagagatattaaagatgaaaatataattgttgataaagattattttgttaaattaattgattttggatctgctgcatgggttaaggatggaccatttggagttttcgttggtacaatagattatgcagctcctgaagtattaaatggtcaaccatatgaaggtaaatcacaggatgtttgggcaatgggtgtacttttatatactttaatatttaaggagaatccattttgcagtgttgatgaaatattagatggtaaaataaatttcccacaatatagtgatataagtgatgattgtataagtctaataaggagaatattagttacagatgttcataatagaccaacaatgcaagatataatgaatgataaatggttaacggggtttagttagtgatagtgatagtattatgtaatatttaagtaatttaatatagcgattatgaatacatgtcttgaaggtttatcttgtagatgattgttgtttattctagggataactatgacagatatcaatagacggttctctagagctgcttttattaatcagaatggatcaaatgatcatatgaataatggtaataatacatttaatgttaatcaatattataataataattataataataaaagtcaattaacaattggaggtgaatcaattagatctgttgaaactggtgcaactaatgcaactaatgcaacaagtaatacaaggagaagattttcaattaaattatcacaacctccaattggaatggatgctccacctttaccatttaatgcacataatcaaatattaaattcttcattaactaatttaaatgagaataatattacaattaaggaaactactaatgatgatagtaataatatactttatgaattatcaagggaaaacttcaatgcatcaacatttgttcaaagacaattatttgatgctgatgcaaataaaattgattcatttataaattatttagataaattaaatgaaaataatgataatgaaattaaattttcattaagtgaatcaattaatcaagtacttgcagttagtaatgcttttaaaaatactaatgaaattcttaattcattaaaacctaaaattaatgatttaactgatgttttatcacaacaaattaatgaagctaatgaatttatggaaagtaataataataataatagtactactggatttaaaactaatagacaatcaattgcaatgttacaaaataaatggactaattcaatgaaaaaactttatttaaatattgatcgtgctcatgatttattacctccaataccaatgagacatatacttatagaatcacgtcgttggggggaattaaattcaattacttttaaacctgtacgtccagttcatttagttattatgaatgattcaatacttattgcttcacgtataaaagagattaattctaaaaaaaataattctaatattagaaatgttgcaacttattcttggatgattgatgatataattgtacaaaatgtatcagatatgaaaaattttaatcaatctatggataatttaaataataataataatacaaattctaattctaatttaagttcaagtttaaattcaaatttatcaactacattatgtattaaacaaaaggattcaaatcaaatttttttatttcaaactgatacttcaattgaatatttaaatgttataaatgcaattaatcaagctagatctgaaattttaaatttaaagagaagaagtaataataatttgagtaataatccaggtaatcatcatcatcatcatcataattcaaattctttttcaaatattaatttaacaagaccaaattcatcacatagaatttcaagttcaaataataatattgaaaaacaaattcaacctgaatttaattcatcaattacattaattgatgatttattaacttcatgttcacttgaattaggtttatgtagatatgatgaatgtattggatatttaaatagattaaaggaagaaattaaaaatttattagatattggaattgcaattggtttatcattatcattaattaattctaaaactttaaatgataataattcaaatatttttcaacgacaatttcatttaatttataatattaaattaattaatattaaaaaaattgaagaaaaattaattaattcattattaaatgaaattaaatgtgaatcaaataatattgaaattattaaaaatgcaaatgaaatgtgtttattattaaataaaggtaaagaatcatctgaaatttttttaaattcaagaggtaaattattagaagaatatgttggatcaattagagttggaggtgattgtggtggtaataataataataatcttgatgatgataatttattatcagaattagattctccaacatctccaacaattccatcagttaagagaaatttaacaataagtagatctgatagtttaagaactttaaatattagatcaagtattgataattcagcggatttaatgaatagtagtaataacgatacaattgatatcacaggtaaaatgattatatcatatattcgtgaattatcattagtttatatgagttttattaataaaatttggaatgaatggaatgaaatatttatcaaacaaagtctgaaaggtaagaataagaaatgtatttcaaataatttaagaataattgaatggattaatgaatatttaaataaattgaaaaaatcagtaattgttgcattatctgaatatgataggaatagtattacttatttatcatgtgttaaagtattaagggaagtatttgaaacattgaaagataaagaattaaatgttgattatttacttgatatataaaaagttatttattatttaaatcattaaatatatctgtattaatagatgcaatatttttaatgttagatcgtatagttgtcagattattagaaatattatctaaatgtacactattatcatttggtaatattaaaccttctaaaactgaattaattttaattaattcataataattattataaataattgatttaatatcacttttagcagaattaagtttatctaatactttatcctctgttttaagtatattaatataagattcagtattaataaattcttctatatcatcaattttaaatgaatcaattaaatcatcaattgaattcttatgtgatgatgttattgatttagtgtcgtcattggggggactgggggtattatttgatgtatcttcagtttgttttagtttatagaagttcttcagtgcttctcgttgggctttaacggcagccaatgggttgatggggatatctgatggggtattagtggtcattttgcttaataagaagaagaatgtaatatatggtgaatttgattatctaatttttcatgtatagcatgtaaataacttttcatttcttttgtttaacgtcttttctttcttttactattgattaatggactttgcattagctagaacagaggtagagatacccgcctttcatgaatggagagttgaaacatcgagaactggtgtattaaatattaaattagaatcaggtacagctgaaatctttggtactgaattaacatcaaatattaattatacttttaaagaatcaatgaaatttgcaatttcaacatatcatggatgtaaaatatcttatacaactacaagtccattagatttagaatatatatcagaagaaactatattaaagcaaatattaaacctacatttatcaattgaaaagaataatattagtaataataataataatatctaattcacgtattttaataattggaccaaaagattcaggtaagacttcattagcacgtacactttcatcatattcattgaaaacatcaaattctaaacctataataattaatttaaatccacaattatcacattttacaatgccatcacaattaactgcttgtgaattatatgattcattagatattgaaacaacaacatttggtgaaacagatgagtacaggtcctggtacaggtctttatagatcacaaattccattagttaaaaattatggattagaatcatttacagaaaatttagaattatataaatgtttaataaatgaattatcaattgaaattgataataaattatctatttcaaatttaaaaggtaatataataatagatacacctgcatttaatgtatcaaatgccaaaataattcaacatattataaattcttttaaaattaatattatattagttgttggtaatgaacgtttacttgttgatttacgtaaaaaattaacattaaatgataaggtccatatgattaaaatgccacgttcaagtggttgtattgaaaaagaaccaaaatatcaacgtgaattacaacaaaaatcaattaaacaatatttttatggtagtaatagatgtcaattaaatccttatacattacattgttttacaactgatttcctttttttaaaaccaaaagaattagatagttcaaatatggaattaatggattttatgaatggtgatgcagatgatgatgataatgatgatgatgattatgatccatttgctgggaatgataatgataattctaagaaaaaattagagagaaattggaaatataataatatgtttcaaataattgatgatccacaggaaactgatttaatgaatgtaattgtttcaattatcgatgataaagatttagatataaagaaattattatcatcaaatgatattgatgaaaaggaaaaactttcgataattaataaacatgtaacaatgagttcagttttaggattttgttacgtttcaggttttacatcatctacaaagaaattaaaattattagttccaacacctgttacaacattacctggtaaagttttagttttaactcaaatgagatatcatgaataagtaagtaagtaagtatatatatatataatctaattaatttaattctcattataattaatacgttttgctcgtgtacttctatttcttgtaggtatcacatcattttccttagttttagtaacatattcttcattattatctatatttcgacttattttcttcaatggaagttctttatcaagtgcatccaactttctcttaaccgttttagaatctccactaattgtactctttgatttatttctaactttcctttgaccaacttgtccattctcaattttccatctacgtttaattatttcatcaacaatttcaaaatatttttcattaataaatgttttcttaattatactattagcaattaaatcatctaaattatcaaataattcaattggtaaattaattttacctggccaaactgtaatactccaattcttaattttacctataaatttaattgaaatttcagttaattcagataatatataaattgaatcttcaaatttttcggaattttcaggtataagacatttacctttatattgtttaattctttgagttaaataaaataatactgaaatattttcagatgtaactataagtgaaaggaaatagataatatatgttaaaccaaatttagcaagttcttcaaacttctcaggccttaataggtaatttcactttcattatcgttatcttctatagaattatattcaacaaataattctttaaattcaggatgattgaatatcatatgaattaatgtaataaatgatttttcaaaaattaatgaatcagcagtacttgatttattaatatatttattatatgaagctctaatccaaattgatgttgattccttaattaaacgatcaggttcaaatgcaacaaaatataataatggtaaaagttttttatttaatttatgttgagttaattttttcttaattttattaataaaatttaatctaacattattattagaatcttgaattaataaaattaatctattgaattctacgttgatcaataattgaattaaaaattgtaaatttacttaattttaaaatttgataacctgcatgtaatcttaatcttgaacgataattttctggtgtatcctcttgagaaacaatttctccacctctattaatatatgatgataacatacttaatataggtttggcaactgattcaacatcaattgttaaatcatcatttattgaaacaagccaattagttaataatttcattgttaatattttagataaacaattgacattttgtttattataatataattctttatcatcgatccatgtaattgtatccttttcatcatcttcttcctcctttatcgtattcttcaatagaacatatgtagctaaatatttactaatatcttctttaattgtatcaacagataatatatcatattgaaataatgttgataatgttgataaatgtgtattaaaataaattgaatcaatatttaatggccaaataatatttacaattttagtaaataaaggagttttaatatcatttgatgttttatttaataatttaattgaatatttagattcctttggtgatccattaattgaaaatttgaaaagacaattatgaaattcattatcattatcattatcattattattattaattatttcatcattaccatttgaaatataataattataaataatttttaaatcatgataacaatcattatcaattctattggcttcaaaatcaattgatttagataaatttataattgaattaattaatgatttaatatttgattgctaaaacaattggacaactttcagatatattatttaataaaagtttgcatgtctcatcatgtaattttttattattcattataataatttcataaatattatcaatattataaaaaatatttgatgatcttaataataataatttaattgtattataaatattagttttatttaataatttattatcacctggattaaattcattatttaatttcatttcattaattctatttaaaactttctcttatactatttacaattgtatcataatcagttgatttatttgaacataaaatcattaatctaattaatctcttattttttaaattgaaaaaatattttaaacatgattcagcttcatatgatgatgggaaacttttagataaccaattaattgcattattaatttgatcatcgatatcatcttcattattattttcaatcattgttaataattttaataaaactgatgataattgagtttgtcttttcattattgcccaaaatgataataatgatttatgatttaaaagtgaaattaattttaataatttattaacacgatctttaggattatctgaaaatggtaataatttttcaaataatgctaaatcaacagttgcattaattgataaatcatttataaaaattaattctaatatattatttggaatttttttaataaaatcattatcattatcaataatattattctctgattgataattatataaagttgataagaaatgaataatttcatttctaataagtggatttttttcacgtaataattttaataaagcattcgataagtgaattatttaatatgttatttaagaaagtttcaggttttaatttacttaattcaataattgtttgatatctaactttttcatttgaatccattaaagttttcaaaattccattaattaaatcatttgataaatcatttctattttctaaaattttagaaattccatttaaccaacaaattctaatttcaaatgatatatctaaaggttttttcaaccaattcatataagtttcagtgtaattagatgagaaattaattcttgatggatagatggataaaatattggaaactgtatcagttgcagttgatctaattattaaatcttctgcctctaattcattatctaataaacctaatactgaagttaaaacttctggaacgtatctccataattctattgctaaattatgtattttctttaattgtatgatgtctagttgtacccctttttgaggatgacttattttcatcatcactatcactatcactactaatatcattatcattatcatttgttgcttgtaagatcatttctgagaaaaaataagtaattaatcttgacattttatctgaatttaattcacataattttaaactaatattaaaacctggtactttaaaatttgattgatttttcaaatttttagaattaactaagaatttattaagtattaattttaaaattttcaaatctaattgattaacttcacttataacttcacctaatatatcaaccattaaagattctaaatgatcattactgacattgtttgataaattatagaaagtttcaaataattgtaataataatttttcacaattatctaaatctgttaataatgcaatcaattcaatttccgctactctctccaataagtaaatataattattataataagatgaatccacatttgttaaataagcaaattgatttatgaataatttgaaaatatttaataaattaatattattataaggtgcatttggtgcaaataatcttaaaatatctgataaacaacaactaactaagatttgtatacctaaattagtatttttcaacaattttttatttataagatcatctttaatagattcaagagatgataaatctattgatgattgatccatgtttgataattcttcctgtaatgttgataatcttagtagcaaatctttagaagatattggctcagcagccgttgaaatgatttcttcattaaatttaagtttctgggacattttcagctaactaaaaggtatactactaatacttgtattctatttcactgataccagctcctaatacctctaataccgtttaatacccactctaaacacgtattaaagcttgtccaaaagaaagaagaaagtgattataaagaggaattcccacgcgtcattaaaaagacattcatttattattaattactaccttcttactataacaacaccattgctatcgaacataactataaataatgactatgttatcatcactacataacagatacatttcattatcaccaagtaatacctctaatttgagtactaaattatcatttcaaatcttaatattacaaatactttactattttacagcatttataatattcttcattacatccatattacttggttggaatgaatcaactttaaaactaatattttcatgggaagaaatatcattagagaatagttttggattaacattgattctattatggttgattaattcacttatttcagtattaattattacattaattataagtagatcaaaattagtttgggattttgcattaacaattcatttattaaatttaattatcatatctttaattaatggattcccttggaatttttattggtggattttagaattaattacagtagttttagttattatattaggtacttatacaactagatggattgaattaagggatacatttttcgatactgatattgaaatgggtagtaaatagggtctatataggtttatattatattatactatgattttaaaaattcgattaatttatccttaccctttaattctaataatcttttaattgataataattcagataattcatcttgcgggagattattatcaattactttaatttcatcatttgatatatttaataatttttggaaattaatttgttgatattgtttgtctattattggtttaccacttaatttacttaaacttttaatataatcttttaaatttggatttaaattcatcaataattgaaatgatttatcattttcatttattttcttaattttattaaaatttataaaatcaagtataatttcttcttcactaagttggaatgtaatattactaaattttaaattggtatcatttttcaacaatttcaatttatccttcaatgactttaacttatcctctatattaattatttcaatatttgcattaattggtaatttaccattaattttttcaaaatttttaatattattaactgttaaaatttcttgatttttaaattttcttaatggtaatgttgacaaattatctacatgatttggacatttccattttgaacctaattttttaacattagtcattggaaattcataatcaatacaatctaaatgccaagataatgaacaataatcacaattaattatttctctttctctattaccactttcaccacatttataacaaaaatatggttgattatttaaatcatatataccatttattggatcatccatttctttaattaatgttttataagatttaacaattttaaaagaattatcattataatcacctaatttatcagatgataaatcttggaaactttcaattatttcccttggtaattgaaatgaaattgtatcttgaaataatatattatcaaataatttaccataaattccaatacttgaaggtatattctttttattccttgacttgatacattctttacaataccatgaatcaggtaaattatttgaatcgattggaggtaaaacacattgaaaatgataagatttggggcatgattcacaacaaataaacatacctgtcataccacaacatgaacaataatcattattaattggttggttatcttccacaggaagattctcctctatattatccggttcaatatcaatcattgatttatttattttatctaataacgtcgtagaggggagagtcttcttagtatactttctcttcattattttctttggtgataatgataatgtgggtattggtacagattcagaagataatgatgatgatgatgatgatgaatcactttcatcactagtattagtatccttactatctcttagaatacttaatttagtatttttttcaatttcccgttgatcctgtaatttcttctgataattttgaaaacattgtacaatatcattactattatccaccttcttcttatttaaaacaccaaattctttcttaattttaattgaaggtggatcttccattttttgacctgttataatcacactatttgataactccggctcaacaaaagagtcactagtaggagtgatatcctctgtcctgtcattattcctcagtctcctactgcttctagtcatagtgggtgtctctaaaagaagtgtctattacctattctactactattataatataatattcatgttaagtaagtaaatataatggaaaaaccccacagacgcgacggctgcccaaacgggtaatcgcggctaattattatagggtctatttctattattataattatttccattatattttccactttttgactcattttccactttcatttcgtccatttattccttcttttattcctctctcttagtaacaatgcttagacttactagactctattcaatgaccattccaaaggataaattaaaatatatcccaaccaatggtacttaccctaaaggttttaaagttggttcagttagttgtcaagttaaaaaaaatggtaatcccgatttatcattaatttattcatcatataattgtaatgcagctggtgttttcactacaaataaatttaaggcagctcctgttataattgatagagataatttacaatctaaattaaatcaaaattttaattcaattataattaattcaggttgtgcaaatgcagttactggtaatggtggattaaatgatgctagggaaattattaattatactgataagaaattaggtaataatgttgagtccatctcgaatacacttacaatgtcaacaggtgttattggacaaagattacaaatggataaaattaaatcgggtattgatcaaattgttacccaactggattctaatcatgaacattggcttaattgtgctaaaggtattatgacaacagatactttccctaaattaatttccaaaagtttccaatataataatattacttataatattgcaggtttagttaaaggtgcaggtatgatttgtcctaatatggcaactttattaggattaattataactgatgcaccaattgaacattcaacattacaaaatttattaactaattcagttaataaatcattcaattgtatttcagttgatggtgatatgtcaactaatgatactattttatcattatcaaatggtcaaagtggtggtgaaattataagtgaaaatggtaatttagaattatatgaattatttgaaaaaaattataatgaattagcaattgaattagctaaattagtggtcagagatggtgaaggtgcaactaaatttattaccataaacatcaagaatgccaaaaacgatttggaagcacaaaaggcagcaaattccatctccaatagtgcattagttaaaactgcaatgtttggtaaagatgctaattggggtagaatcttatgtgcaattggatatagtaatattgaagttaatccaagtactactaatgtttcatttataccaactgatggtagtaaagaattgaaattgttagttaatggagaaccacaaattgttgatgaaactagagccagtgaaatattagaattaccagatttacagatagatatagatttagggttaccaggtgatggtcaatgccagttctggacatgtgatctaagtcatgactatgttaccatcaacggtgattacagaagttaagactctaagctttataacacgttatgtactttaaattaaaagcgcgttggtataaaaatggacaattgtcgacgatttgtttatttacttttgtataaggtacttcttctttgaaattgtcttataagtatcgtaaatatgtcctttgctgatagagaacaacctcaaaccatctgtcttttcgatgttgatggtactttaacacctgcgagattaactatctctccagagatgaaaaatatgttgaaagaattaagaaaaaaatgtgctgttggtttcgttggtggttcagattttgctaaacaattagaacaattaggtcctgatgttttagaaaatttcgattattgtttctctgaaaatggtcttactgcatttaaattcggtaaacctttaccttcacaaagttttattaattggattggtgaagaaaaatataatgaattaagtaaatttatcttaaaatatttatctgaattagatttacctttcagaagaggtacttttattgaatttagaaaaggtatgattaatgtttcaccagttggtagaaattgtaatacagaggagagaaatgaatatgaaaaattcgatttaccaaataatattagaattaatatggttaatgcattaaaggaaaatttctctgatttagaattaacttattcaattggtggacaaatttctttcgatgttttcccaactggttgggataaaacttattgtttaagacatttagagggtgaaaaatttaccaacattcatttctttggtgataaatcttataaaggtggtaatgattatgaaatttatactgatgaaagaactattggtcatgcagttacatctcctgaagatacaatgaaccaattaaaggaaatttttaatttataattaagtatataataagttatttaactaaccaaccttgcatatgctaatactagggaaaatgtacctgcacaaacaccaaataaccattgtaaaacagttgttttaacactatcaatttgaacttttaaattataaatctcttgattgattcttgtatctgtttctttaatctttaaatcatatatactactctcctctcttattctacctttctctaaacttaaatctaatctaacactactcaaacttttattaatctcctccttaaatttaattctcatcttctctaattcacttcttaatctttcattctcattcttaattgaattaaaatcacttttatcaattaattgtaattcaccttttaatttagcaaaatcaactttttgcttatatgacattttattaagtacttctctactaattaaatttgatgcatataattcaattccatcattaatactattagaaattatatttgatgcacttttagcttgatcttcactaaatttaccacatttaacaaattcttcaataaatttttgtgtatcaaattttggtccattgactgatagaagttgataacttgaatggaagtttctaatacctgttcttatacctatcatatcgttgttaaaagaaataagaaaaaagtagtaattatctaataacaatttttttacgccacttcctttctttacacaatgcaatttaggaactttgatcccaatacaaacactcaaataacacctgttgagttagttaagaaaatatttaatgataataatgataatgatgatacgatactaaaatcatttaatatagacaaatatcttaataaacccaccacaactgatataacaaaagatttacttggtaaatataataaaattgctgatagtattaataataaagttattaaatcaaaaaagattaaaaagaaggtatctacaactccattaaatgaatatgatgaatatattaataataaatatccatttattaataaattaaaaaatgaaaagtttcatcaactcctacaacaacgtataaaagaattaattgaataatgtatgtagtgatatataatataataacctatttaagattcgtataatgcagaataaccatataaaatagaaaatataaagaaagcaaatgaaccacctaataaaattgttcttaaactaatccttgttgaaatatattgaccacctaaactgctaataaagtacataatatatgaccaattgaaccaccaattataattgaaaaccaatttgcacctgctgccattgcaattgttgtaacttgacttctatccccccattcaccaaggaaagtcattgaaaatgtttgaaaccaaattggtgatgaaatatatgaaattaaatttttaatccttgatgtccaagtatgtttaataatattttcattagctttctctaaatcattagaaatttcatttaattcaacattagcaatttcttcttcaacttctgccagttcatcttcaacaccttgatctttagaagtatttaaaccttctcttaataaattaataccgaaaattaaaaataaaatacttgcagctgatctagttaatttaggtgataatatttgtggtaataattgaccaattaaacctgataatacagtcattaaaactaatgcacttgaagcagctgagaaaacaatcatttgagaatgtctcattgccataattgcagcaattaaaaaagttttatcaccaatttcactaactataatcattgaaattgataaatagaaggaataaaatggtgatgaaagtgtttctaatgaagtttcatctgtatattgtggttctttattaattgattcatttggtttattaatagtatttgaagtaattgaaattaaatctttattatcatttgaaatcccttcagatggtggataaattgccaatacagttgatgcaagtaataaatacgcagataggttaccaaacttcattgtccactgaccttaagaaagaaaagaaatactatatccaccaataaagagattaatattggtaaggtaccttatattctattttaaaatgaaaaattcaataaattgcgggataatttatttattatacacgtttcctattgtggacagtcttaagacagtaagcttaattgtatcttaattttattgaatcttggagaattatatagttttatatagtagtagtatactttaaataaataaatagaatagagggacatacatctttaatgaccatggaaagcttcctttggaattggattatcaacaacaataccatttttaatacttgaattttcataccaaccaccattatttaatccaccattaactaatccattctttaatttatattcattaattctttcaatcattaaaggtttaaaatttttaactaaaccttgatatggccaactaaatgcttcacccattgcacaaattgaatgaccacaaactttataagttagttctaatgcttgatcaatttccttttcatttgcttgaccaactgctaatctatccatcatctttgataaatatgttgaaccttccctacatggtgtacattgaccacatgattcatgtttatagaaagctaataatctttgtatacctctaataacatcagcttgtttattcataacaattactgctgctgtacctaaacctgatccaacatttcttaatgaatcaaaatccattatttgatcttgacatgtttcagcatttaaaattggtgttgatgaaccacctggtataactgctaataaattatcccaaccacctttaacaccaccacaatgtttttctaaaatatctttaagagggactgacatttcttcttcaaatgtacatggttcattaacatgacctgaaacacaaaataattttgtacctgaatttctttctgcaccaaatgaattaaaccaatcaccacctcttcttaaaatagttggagcaactgcaacagtttcaacatttgtaactgttgttggtctaccaaataatccaacacctgcagggaatggaggtttcattcttggtttacctgctttaccttccattgattcaattaatgcagtttcttcaccacaaacatatgcacccatacctctatgaatataaacatcaaaatcataacctgaaccacaagcatttttacctaatttaccaaatttataagcttcatcaattgcattttgtaaaataacagtttcattataaaattcacctctaatataaatataagcagcagttgcattcattgctctacctgcaacaagacaaccttcaattaatttatgaggttctttcctaataatttctctatctttacaagtaccaggttcaccttcatctgcattaactgcaacatatcttggaccaacatttttctcccaatttggaggattcataaatgaccattttaaacctgatgggaaacctgcaccacctctacctcttaaacctgattttttaatttcatcaataatccatttatcaccctttaataaaatttcctttgttttataccaatcaccaattttttcagcagttttcaaatcccaaggttgagtaccatgtttcttggaattttttaaatataaattttggaaaattctatctttatcttgtaaaccaccatgaattctatttggaattgatgaatcaagtgttgcaaatgaacgatatgcaagttttgatgatgatttagatgtaaatctacgtacagatgataacattgttgtctaataagaaatatctatctatatctaaacctataattttaataaataaatctaatttcccctcaaaaaaatgagaaattggaaattaacgaaattttatttgctgagagccttcaaggtgtaaggatgtatggtctttggagactatgcgtcggtattctcatagagtatcagagtattagtattatagaggatatagagtatacagtatagagtatagagtattatacattacaacttagtggtattacaaccaggacatttgcatccactaccacaacaacatctacttggcttttcactttcctttaaaccaccacatgaacttgtcttagtagaagtactactactactacttgctgttaatttcttattctcttctgatctttgagtgcatttacaagccatggtgtttgtttaatgagatgaagagaagagataaagagagagatagggaatcatttcagctttataataatggataactaagcttatcaatttaaatcgcttatcgtatcttctttcctaatggggaaggtggaaccgcctggggtattgggtggttgcccttttaggaaggtatggcggtaaggactgattataggtataagctacaatagatgataattataatcataaatttatattagaaactgaattaaaaaaacattacaaaacattacaaaacataaatcataacttacttaatttttttaattcttccttaattaatttaccaataacaggatttgccttactaaaatattcagcaactctttcttgaataaaaggttctgcatcctttgcatgacttgcaatattatgaactaatgcttcttgttctccattagttttacctaaaacatcccaaaatttacctggttgaacaaaatcgtaactttcatcaattgtccaatggaatggtacaacttcttcattgatatttttcatcattacctttatcttgattaaccttagcaggaactgtatattgaacaggacaattatatgcatttgcataatttggtgtagaacctaaattaccatcaattaccattgaaccatctctaatttgtggtgcaaatgaacctgattttaatggacaattaattggaatttgatggaaattcccacctaatctatgtctttgagtatcaggatatgaaaataatcttgattgtaaaactggatcatttgatggttgcattgaaggaattgtatttgaaggtgaaaatgcaacttgttcaacttctgcaaaataatttgaaggattttcattagtgtaaatctaccaaaatgtcttaatgggaagtcactatgaggccaaattttagttaaatcaaatactgaaaatggttgctttttactttcctcaagggtcattgtttgaatataacaatcccaaactggataatcacccttttcaattgcatcaaataaatcttgtgtatgatgatctggattatcacctgctaatttacctgcttgttcattatttaaattatgaacaccttgtcttgaaataaaatgaacttgaacataatgccaatcacctttggaattataccatttataagtatgaccagaataaccattcattgttcttaaacttgcaggtgtacctctctctgagaaaaggtacataacttgatgtaaagattcaggattattagttaaataatcccaaaacatattagcatcttttaaattagtttgaggatttctcttttgtgtatgaataaaatgtgggaatttagttggatctctaataaagaaaattggagtattattataaactaaatctaaattaccttcctcagtataaaatttagttgaaaaacctcttggatctctagcagtatcagcggaacctttttcaccaccaacagttgaaaatctagtgaaaattttagtttttttaccaatttgatttaaaaatttagcatcacagatatcagttatatcatcagttacttcaaaataaccataagcacctgcaccttttgcatgaacaactctttcaggaattctttctctatcaaaatgagcaagtgaatcaattaatttaaaatcttgcataagtaaaggaccaattggtgctttattattataatcattattaacaattgaaattctttgagttgagaaagcatctgaaactggacaaccattggttgttgtgtagactggtggatttgacattgtatagttactaaaagagagtactgaaaagagattacaatacaataataaaagcggatactacttagtatttatacaattcaccactcccaatcagagggaatggccaattaaagattacaaattgataatcatataatcaccatggtactgattagaaactccgcccactgttaacaaattacggcgcttattttctgtttccccgattaggtaactgtaagagattattattaatagtagaggattccagtcttttattatttaattacgtaatatcatttcatgccgtcgcgtctgtttttatttttatcacgtgactcgggattggctattgacttctccgatgacatgaaaattttcaattaggaatagtttagaataattttaataactgaaataaacattctttttcctgaaaacaatcaacaatgtcccaattacctgtatcattatctattaatatcccatttcttaacaacaatcatgctttaattgctcaaaaatcattattacctgatccaatgcttaaacctgataccgttaatgtacaatataaaattaaaaataattcaattttaaatataattgttaatggaattgatgatagagttattagagttacagttaataatttattagaaaatttgaaaacaataattgaatgttttgaaacattttaattttaaaaaaataatacttaagttatatattcttatacacttacaatctctcttcaaatcttaattcatctaatggttttaatccaattaaaattcttaaaaaattatcaattgccattctttgcttatttaatgcattaattggttcatatcccggtctcgttaatggtgcttttaaccaataacttaataatgataaaattgtatacattttctcatatttagtcatctttcataactctaattctagttaaaaattcagtcataataattaaatcaattattaatggtgtagctaataatgaatcttcacaaatattatgaattgaaattctattatgtccacctaacattaattcactataatattcatccattgcaactttactatcaccaactgcttctaaatatttaattacaatacaatgatcaattgattcatcatttttataaagaattcattactttcaataacatcatcaacaactgatgctttggaaatttctttacttctaaattgccttggtgatgataaattatatccatcattattacctaaatgattatatgatgcaattgatttaattttaatacctgcatcaactaaatattgtgccataactgatttaaattttgtttgtccactcttaaaatcatcacctccaatgaaaatatcatttgcaattagccatttcaattaatcctggtacaaatgtattttgtggtgatccattaatatatggtgaacctttctaaaattgatgcaactgcaaatatagtacttgctgaaatttcattatgaccttctttaattgatttaattaaattttcacttgtatcattaacaccttcaattaattcactatatctttcagtatttgctgtccataaaacaattactttatctaaattattttcaattttgaaaattcctgatatcatttctaattgtttcaacatgttcccatttattatctaattcaactttacctttaccaccttctctattaaaacaattatttgccctatcatcttgatttaatgcaataaaatcaggataataaatagatttcattggtttaattttttccataaaaggttttaatttttcccttaaatcatattctaaaacttttgatctattcattgcatcatataaattcatttcattaatatcccaacctgaaataatgaaaatcatttggattaatcattggtaaaatagaattaaatggtacataaatatctttaccattatatcaatacctaatttaattgttgatgattgtgtaactgatccaaaataatttgattcaatttcaccttcacgtgtttgaaatttaattttttctctattggcaattgttgcagctgtaaatgttgtaccattattaccacctaatccaactaataaaacaccaactctaggaacttttaaatcaactttaaatgttaaatcagtttcaatattttcaacattatattcattagtttccttattaattgaaacaattgaattttcataagtgtatttagttgttaattctgtttcactatatgtggttctatcagtattaactttaatctttggtgtgaaagatgtcattgttgtttgttattaaaagaaagaataaaaaaagagaagaatcgggtcataatatgggaatatacactggtatttatagacaaatataaaagaaaattgttggggaagtcctagaatgcattacggaaagggcaacgtgttatcttggaatagaatagaatagaatagaatagaatagaatggaatggaaaggaatacatagctccaattggtcaattgagttcaccgaagtgggggggtaagcaatatttccggcaaaataaccgagattgtgtgtacactattatagtgccaacagaaaattactatgagaaaagactttgaaaatagattgtcttcggtgaaaatgccgcacaccactccactgcttctcggcgttttcgccgaaactgtattatgtttttgtttattattattattattatacagtgtatttatttatatttattgttatatcttgattggataattggaaacttaatcaatgtttacatattgcctagttaataactcattctaagcctcagtatttgcagctttattagcatttgctgcaataactttctctctaattatattatctatactatttaataaatttgccttttcattaattaattgatttaatttaattgaatcaccatttaatttttcaattctcttattgaaaaatttaattgattcatcttcatccttttcaataaaatatcctgtaccaatatcaattttaaatttattaactttattattacctttaatatataatgatgatgttaatggtataaacatttcattatcctttgaatcattatttatttctttaacacttttaatacaatctttatatttatttgttgctaaaattaatgcttcatatgatgattctaaatgtaataattcttgattagtattttgtttaaatgccattaattgttgtggttctaatgatgataaattaactgacattgttatattttctcccttaggtggtttatcctatattatatactacttagttgaaaaaaaaaaaagattatcctaaattaactttcaattataaagcatgcattgatttttcatcatttcatgttgaaatattcatgttgaaaaagagacttaaaaattttacaaaaaataaacgttttaatcgacaactgcaggattcgaacctgcgcgggcaaagcccaaaagatttctaatctttctccttaaccactcggacaaattgcctattacactgttttaaaacgctttgctgtttcccgccgcttctttaaaaagtcacgtgatctgagccaattgtcttttaaacgatttacaaggttttattagtaaatatacctgttaaaacaccttatttatgatttatatggtaaaaatattatatatttgtttaaataaagaagttaaattaatattttttttacttacaatcatctttttttttcaataattaactatttcaataatatttttatttttaaagagtaagttcactattctcagtaaattacatacaacttaacttttcttacattaaagaacttaatagttgtttgattagattgcttaatagttgtaatttaaagagtttgaaaaaggatttatttttattatctaaataaattataaaataacctaaagtttacaaaatacaaacagaaacgtttttaaaagttggaattctttgttttacttattataatttattatttagttttgtctgtaagtactagtctcaaaatttaataagtagaagcaatcttaatagctaaagaaatacaaaaaatttacatactaaactaataaacatatctgaaatgatgattttcagtatcagttttatcctttaaaccttcaataataccttcaagttttaaagattcatcttcttcaggattaccatataatttatttcttcttttattttcccataagatataaatacctaaaccagcaccaattacaatacatgctgcaaaacaacccataattgttgctaatgcatgagtatattttggtgcatcacttgcattaaaacagaaaggaccaacaatattaccaactgcaaatgcaattaaaactgcactatttgtaaatgattgctttgtatgaccactaattaattgacctgtcatattcattgcataagggaatgaggcactacatgaattaatcatccaatatgcaaaaactctaccccatttagctgcatttccatcctctgtaccataaacaatggctaaaccaattattgcaataatcattggaattgttaaacctaaaattcttaaatttttaaaataaataccgaaaaatgcccaaacccacatttgaccagcagagaagaatgaccatggtaaattaactaaaattgtttcatatttactaaaattgaaatgatgaaagaactaatgtattaaaatttgttaaaccaccatttggaatcatactgaaaaacatatatataaaattaagaaataggttttaggatctttaattgcttcaataatttgtttattatcccaataaattgttttgaatacctgtcatattacctgcaactctctttgttgcaattaatctttcatagttcatgttaaaaattgtgcttcacttggaagtgttggtaaaaagaaccacatataagtacctaaaataatacttaaacatgctaaaacaaggaaaatatattgccatgaatataatgaaccatcattaacatgtcctaaaccatatgcaactaatgaaaatataatatataaaccaccttgacctgatgcaaaacataaaaatctaaatggttgttcatcctttgtataccattcaccaatataattaatacaagcagctgaaattggagcttctgaaacaccaagtataaatctaataaccattaaaccagcataatttttaacacctaaatgaccgaaaagtaaaaccccccaaactaaacaaacaacacaaataattttagaaactgaaaatttatgaataataaaatttgcaggatattcagcacctaaataaccaaaatagaaaattgcagaaacccaagaatattgattaccatcaatattaatatcttttcttaaattaaacataacagcccatgataatgctgctttatcaacataattcataccataaactaatgtaattaaaggtaaaattctccaatcaatttttcttctaactcttctattttcttcaggagtaattgcttcatcaatatgaccttttaaaattttataagctttatcacgaatttctctttcttcaaaatcatcaccattttctaatgattcaacagtaacatcaacgtgttgtttctcatttgaactagttgaattatttgatttaatgatattttcttctttatctaacatttaataattgtttttctttgttttataaaatatatgatcagattaattttttaaaaaaaatagaatgataatatcgtcttaatggagtatctgatcaccttttaaataccgtcagatcataaactttaatcgataaaggggtatgttatcggaaaacgatcaactatctataaatattggaaaccatgataaatactgtcttataatcgcatattccgaaacaggttcccaatggaacccttaagtttgataagacatgtgggataatagtgtcgcataatcccaaaagggtaattcccaaattttcttatcagtagatttcttatcttatcaaaactgtaccttatcatgtccattgatgagttacttttccagcggatattctcaattaggtttgattacatcatgggtcgcatattctacaaatggttactgtttaaattataatcatgaaatatattcataaatacaatttattaattgattgatacgacctagttagtggaactatccatcttgattggatcttttaagtcaattcaatcaacaatgaaaacagaactaccagttaacaatccaattaaatcattttggctaaccgctgaagatgaatttgcaacttatcgtactaaaggagaattaccacaagaaactgatattataattataggttctggttatgcaggttcaacattagcttattatctatatgagaatgatgaaaactgtccaaaaaatcaattttaatgttagaggcaagaaactgtttgtagtggtgcaactgcacgtaatggtggtcatttaaaacctgatttatatagtcaatataagtattttaaatctaaatatggtgaaaaaggtgctgctgaaattattaattttgaacattcacatttaaaagctgttaaagaagttgttgaaaaggaaaaaattgattgtgattttgttttaactagagcatgtgatgttcatttaagttctcaatcaggtaaaagttcaattgaaaattattatgaaatgataaaaaatccttatgttacttgtaaggatgatgttcaaattacatttggagaagcagctaaggtaatttctaaagttgaagactcatcagtttgtttaacttatacagcaggtcaattatggccttataaacttatgactgcacttttgaaaaaagttgtttctaaaggtttaaatttacaaacaaatacacctgttttaaaagttgatagattggagaatggtaaatatttagtagaaacttcaagaggtaaagttattactgaaaaagttatttatgcaactaatggatatacagcagcaattgaaccaaaatttgaaaataaaattgttccaattaaaggtgcatgtagtcatattatttcatcagatccaaaaattagaactccacatttaactaatacttatggtattagatataaaggtgcagatacagattatttaatcaatagacctgatggatcagttattgttggtggtgctaaaaaacatattttcccatttaaagaagtattttataataatgttgatgatagtacattaattgaaggtacaaaggaatattttgatgattatatgaagaaaatgttttatacttggaaagatttcaaagctacaactgattatgtttggagtggaattttaggttattcagatgatactgttccatatgttggagaaatgttagaagaaaagaataagtttgtcattgcaggatttcatggtcatggtatgccaagagttttattatctgcaaaggcattagctaaattaattaatggaaattctgattcacttgatattccttcagcatttaaaattactaaagatagaatggaaaatactaaaaacaatttattagagatgttaggaactattccaaaatcaaaattatagcttttaagtaacatttattttataacattattttttctacttatagattttatttaaatttaatcattatttctagtttcaaataaataaaatataaatgaaaagatgacaattctaataaataaattattgtttcagtaaatgaaaataattgaataaatgaagatactttttttttagttatataaatgaatattagttaaataaattaaaaataattaaacaattaagcaattaaacaattaagcagcatttaattctttatgcttagcaataattttatctgccatatcaactaaaccagtagcaatgatatcaggagaaccaaaaacttcaggacaaggttccttttcatgaacacttgaccaagcggtaataaaaccaccttgtttagcagcaatggaatcccacatatgagaagctgcaaagaaagcatcattaccagatgaaggaattttatttgcaataaattcataaactttagcttcaggtttaccaacaccaattgaatcacatgaaattaaattttcatcaggcatatcaacacctgaacgtttaaaataacctgcaactctatcatgagatgcatcagtcaaacaccaaatagtgaaaccataatctcttaaacgtttaaacatttcctttaattcaggtctaccttcaagtttaaaccattcaccataaataaattctaaatcatcatcattagcataagttcttggttccttaacaccagcaaagaataatgatctatagaaagtatatttgaaaatatcaccaaatttttgataatgtttacattgagataaataagaataatcacgttcacaaccagcaagccaaaagaagaaaaataaacgtggatcaataccagattccttaaatctatcaccaagtctaagggtaattgcatcaataactttttcataagagatacaggttccaacaatatcaaagacaatatcaggcattttttttaatttattttgtgtttgtgtgtttttgtgttttgttatttaattaaataaaagaaaagaatgaacaaaaacctttgagtaatctggataatcaagaccttttatacttattatcatccatataataacttcaaatagaaatagatataccaaccaatacctctaaataataaccaccgatcttatcgcatattcccaattgggaaaaacgataaaggctgataagaaaaatttcaaatttccaatttctcggaacttgcggttttcatcatggcattatttagtcaattttagtgaaaagttcaatatataatacctccattttctgatatagattggttatgtggtttatttctttatataacgacattcaagctaatttcttgcttatccaatatcaagtgttcaagaaaaaaaaaacttagtaattctgcttttattaataaccttcggaaatggttaattagtccaattacgggacttgttacatactattaataaaccgacagtaagatctaccattggaaatttgattaatgaatttacattatggtttattaaacccgtgattacaaagcatcactgatgacaaattgattttcccaaaaaaagtttctctttgatcattataaccactatgttacttaaatatttggaatataaaaaggaatgtatagtcactttttttttacatgattagtaacgtatttatttcttcttattagttttgatatttttatttataattttttagtaaacttatcctaagtaatttatatcaaataacaaacttgcaaaatgatctctgaaattatcaaattaaattctggccatgaaattccagctgttggtttaggtgtctatttaactcctcctaatgttgcagaaaatatcaccattgaagctttgagggctggttatagacatattgatagtgcacaatattatcgtaatgaacatgaagtttgtgaaggtatctctaaatggatcaaggaagatccatcaaagaataagagagaggatgttttctatacaactaaaatttttgatgataatcatggatatgaattaactaaaaaggcaattaatgtttcattagaaagagcaaaggatattggttatattgatttaattttaatgcattcaccacaatctgattatgaaagaagacatggttcatggattgcacttcaagaagctgttaaatcaggtttagttaaaaatattggtgtatctaattatggtgtaaaacatttaaaggaattattatcttattcagatttaactatcaaaccagctgttaatcaagttgaaattcatccatggttagcaaggaaggatataactgaatattgtaaagaaaatgatattaaaattgaagcttattctccattagttaagggtttaaagatgaatgatgaacatttaatttcattatcaaagaaatataataaaactccagcacaaattttacttaattggtcattaagtaaaggttatattgttttacccaaaactgttacaccatcaagattagttcctaatttagaggctacttcatttcaattaagtgatgaagatattgcaactcttgatactcttgacgaatatatgaccactggttgggatccaactacttatcctcttgatgatgaaaagaaataaatacttttatattataacatattgtatatcttaatgataaattataccatttcctgaaagtaaaaagcattttcaaaaaagtacctatttttcggatatcttatgaaatacaaattatataatcatcgtaacatcggttatatgctttaaacagtaaaggacatgacgtgtatgttcaatagacaggaatacattctatggacaacatttagtgaactttactctttctcaaacatactttagatgctaaacctggtgaaactcaaccaaggagaaattatgctgttaaagatatcgaattaattaaaccaaaaggtttttaatgttcaactgtttatcgatttttcaatgaatgtgttattaaagaagtatatcatccatggatggcaattctttaaagcttgacatgatctattataagatctatagttatgaatgtacatcaaacaagtactgatatagctgtggacttgaccaataaagtatgcattaatccatatgatccctaaaaatttaaccaatcttaaaagtgctaaatctttttgtgatcaattaaccaagtaaaatgatagaatgtcagtgcataaatgttttttactagttgaatatggtattaaaactgtcagtgatcatgttgcaaggggatatgagtatttcataattgattcaacattttctacttcaaaactatttgaaatgtctatctaatatctccttggacagatgcaaatggttatactttgcttttttttgctcattatgtacctgaacttacatgattagctgaaattatatatgatcaatcataccataaaattaatattccatattttaatttatcaatggaaataaaacaaactgttttcccaacttcatcatttagtgaaatagaaatcaaaatacctaaaactattgcaaataaggttgacgagtattatattcaattaacaccattagataccaatatgatcattttgatatcattatttaaagctatgattaactaatataaattttcttccttacactgtttcaaaagatgatttcaaatcaagtttagtattacacggatttaccgttagtgatatagagggaaattattaattgatgttttttattgaaaagaaatttgatgtttataggttcttattaatctgttacaaatcccaatactcttctaaaagataagtttaatccaaaaattatagaatcctccaaagaattcaattttaatagaatctctagaatattgatgatgtctcatattatgaatacataaacaacacaaagcttacgcaaagttttcaggataaataacaaaatttagataatgtccattataagcatatgaatttcgatggtagtattatagaagatgacatagcaaatatactaaaaggattttttcccattcaagagggaaaactgttgtcatcagtgataataaagataaactttatgaactatatcataactttaagtcattagttaatttagattgttcttttttattttttgaagattataataataaaacttctattaccaataaatttcaaaatgattctaacaaacttgtattgattacaacagagtattatgttagtgattttctaataccctatatacaaattgttatcttatatatgaatataataccaagattgaattttttatacaaattttgaattttatcaaactccaaggaatatttaataaaagttttatatgtcgtacattagaagtcaaaaagttttataatattactcacaatagacatgaaaactgttgtaaccgttttgttgattatagatttattaaaaaacttaaacaaataattactgaaccattgattgagatgttttaaatggaagaaagactataaaaaggggagcccatttaatcaattcttcttgcatttttgtatattccaaatgggagttgtattgaatgctaactttgcagtacttgtatcattgtatgtttggtaacaagtgattgttaacgtcttgtgccattgtcttgtataaatagtgtattctttctgtatataatcttgtacttttgttttacgtaatattttacattacaaacgttgaatttggtatcttccacaatttacaataaaaattattatcttcttcttgcttcagtatgtaattaagttccctttcaatgaatgaaccacctaaattggtattaaaaaaagatggaattgtgttattaagaaagcttaggcgttcctatcatcccacatttaaagaagagatatataatgcttttgatgaagtaaaatttccaaaaaagtatagacatttagcaaaaagagttcaccacgatcctctatttatattatcatttggtgagctaaaagcttatttaacacgtcaccttgatgattcatatgatgaagaagaaaaaatcgataaattattagttttttactctgttttcattttaaatgtaacaggagcaaggaaattggaaaaactgtaccttgaagatgattctttttatctgagaacagcattgaaaaattatgaaaagttcaatacagttacaaatttgatttataagttattattttctaaaaatattaaagatgtggaaatttgtaaaggagaagaatggaaagaattagttgacaaaaaaagaaggtcaataaacggtgaaccattcaaatattttaaagatacgtatggtcatgattcatcatctattaaaacacttttaaaatgtgaaatatacgttcaaaggatgatgtgtaatagatgttttggatatcattttacacaactctgtaccagttacgaagatgcagttaaagtggttttattagacaggtggatgaatgacaagtttgattatgatatagatgaaaggttaaaagacgttttaaaattcccattattttcagtttatttaacattggctgtttgcaaaggtaaaaatgcagaaacagtatgtcattctataacagatttataatttgttgagaggttaatagaaacaaatgtaatttcgaaacagttgatttgaatgatttccatcaattgaacattaagattagtaaaaaaataagtaattgaaccattttatttttattaatattagatttgcaaatctttaattgatttagtttgaggttgtatattaagcacatcatgtaatgaatctgtgaaatgatggatattgatttgataaattatatcttataatgaaatattcatcattttgtattgtttagatattatgaatcagtttgtaaaagaacaacacctgaacataaattaataattattcaacaaattcaaaagtatgatgcaattagtgatatgtcatatgatggcgaatcatcaacaacatttaatttaattacgaaaattcataggatgcattatttaattcagttattgaagcattgcaatatttcagattaacttttaataacttaagaaagatagttgcatcattattaccagctggttattatttcttgtgttctgattgtgttggcaatttttttgcttgcatatgtactaagtaaatttattgattggaaataatttcattttgttaacagtagttaaattgatttttataatagtgttattttaatgactgataaattaagctatccaaagttattttattttgctcaagtatttcattaaaaaattcatcatttgattcaaattcaatgtaaagctattgataaatggatgaataaacctagagtagacatctgaattaagcaaactaatctaaagattcttagagtttataattcattcatgataactaagtaatcatagtgcttcaaatgaatggttttgtcaagtatttcagtaaaaaaaagtaaattgattgtatatttaaattctgtaagtaatgaagcattattctcaaattaatttcattttcaatatattttaattgaacatggttatcccagtgtgttattcaggtttcaaaatcctaaagggtactgcatataaaattaatataattcagttaataatatgaataaaaaatattgatggttttaattgatttgataataaaacttattgaattttatttaggtggtagatcagatttattagtttcacacacaatatgatattctcctaaaaatgtgaaattataacacactcaacaaagtatttaaatagtcattataacagtagtatttcataatttgattgcaattattgtatttttgatactgtaaatttgaatcgttttgatgtggtgttgtttaatagtataaacatttaacaaaaaacaataaacgatattcataaagagtaaattgaatcatttatagttatttggaggttcacaaataagatattagtcttttacttaaatgatgataagtgaattatcaagtatagtttatgtttcctattaaaacaaaaaagtgtatccattgtgtctttcctagtaaatactgttcgtttctataattgattaattgattaattgttgtagttttcaaaatagatgttcatataaactatgatctaactggtaaatcattcatttttgttggttatttttgaaacaaattaattcttcatcttgattagaaacaagcagtgtgaaaccagcatcatattgcattatattaccatttaaagataataatcgataaagaaagagttgttaataaactatcaaatttattaagagaacttccctcacacagtaaatatttccaacatgttaattaacagagttttcttcttagtgaatgttgtttcttttattaacaactggttaaatacattgattattaagtctaatgaactgtgatcaataaaagtgatgttgctaatttaggctttcaaagatatgatttaaattgatgtaatattactcttattcattggaatgagtatgatactactaaaacaagtattatcataataatctaacatgatgttctaattaatctttaattttaattgcaaattgtatattaattgataatgaatacataaaactatcaagatatgcaactaatgtattagtttaaaatttaaagttaattatacaaatgttttaatgtttatattaaaggctattttagttaatgagtgaatacaaattcaatccgtatttgaatttattaataaaatgttatttagataatgcaaaaagctttgcagtttagagattacggaatattaaacaataagaaatgataaatccattatacagcaatgaattatttgattaaatgtatttaatcggcaataataataattcaacaacaacaataacaataatgatattactaaccaatcaatcgagtaattagattaatttatcttattaatgttatcaataatgaactgatattatatttaccaaaactattatgaagctagttcaatagtttcaactatccagaaagtactagttaaatcaaaagaatacataacatttacacataaaatattttcataaaatgatttagaagcaacatctataagtatctatatttattggaaattagaaaatcaattattataaatgatttaatatgtgaatgtagtgatacgatatcatgcataccaatttatgttaattaatcatatttaaatgtatctttcaagtttatttaaaacaattttagatattatattcaaatgaaatttatatacataactaatagatcttttaaagtcattgagtataaattggtataacagtatgcagttcatatagtagttgtgaagttagtgtgtttatcttaccttacattaactcaacttaatatatcatcataaatattaacaaataaaataattaaatataaagtttaaatatgtataacttatataacttgctaatgttatcaataattgaattataatagcataatgtgtgtaattaagtgactttagtgaaattcactgtatgagatccctacatgaaaaaaatcaaaagcattttcaaaaaagtaccattttttcggctaatttgatttttggtatttttttggcttttataaatttcggctagtttcggataagtttttttgaattttttaagtgtgtggcttattgttgataagagtttaattgttaaataatcgtgtatttgaggcattacaaatctattttactgatacactataatttggtatgataagttatgtgaaaacactggttacaaataaataagaattaattactaatgttaatatttgctaataatgataacctacttcgaaactggatttgataaatgtaaatgagtataactaatagattagttggtgtaggcgttaatatccttcaatgtactgctttgtagtgaacattggaaacaacacagagtaaattcctttaaatgtcttggagaggatatgaaagtcttatacttaatcaacttagtattgtaattcatatgtaattatctaattctgtgacttagtattatctaatagttttcataacttttcgtaactctatctgtttcagctgggtttaatatataccaggaaaactcaaaaatatacaacatacaacataaactaccatttgaggttattaaattaataataaaagtataaatgataattcttatgcatgaaaaaatttatttatttaaaatatagggtaacgtttactcaacaacaatatggaacattagaaacgcaatattaaccttataatattaaatattattatttagttaaagtttctaattgattgttacaaaagtgattgtaacacatttagttgtaactaaacgtgcaacttctaaaattttcacaccaacaagattagttgcagttgtgaattaagttttatcatcatctaattaagtagtaaaacttaaacttttaaaatttttatgtaactgtaacagtttaagaacaatcgttttgtaaattacttggttgagttcatgaaagtgatgagaattttaataataataattgtgttatttgcattttgttggttgttaaagggaaatagatttatgagaagataacaagttttacaaaattttcaagttaccttctaatgttagaaaaatacaaaaggatatagccatttcccttttgaggttctgtagtgacaattattactatcattcgaatcacctcagtgtaatagaaataacttgttgattgttcgaaaagaagaatgtgtttaatatgctatgattatttttttacaatttttaatttatttatttatttgttttttattttatttaatttcttcaagaagttttatcattgttataaaaatattttcggatctagtatattagagtaatatattttaacattaattaagaaatttttgaatagaaacataactatacataagtgaaggtagtttttctttatttattggtttaataaactcgttttttgtagttttatattataatagcttttaattaagtaaaaatttaacaagagaattgaaaaataaaaaattattttaataaagtttagtaatataaaatgaattttttttatttttgttcgttttacctttttaacttgataatatttattctttttactgccaagcattaattatgattactatcattcagtactgtcaaaacattacatgaatcattcagtattccgagtaattcactcaatataatttttatgtgtgttttatgacatcaaattttgttgtatagtgtacaaattttttaaagtcgcgtgagttggtagtattcaaaagaaccatccaggaatttagtaagaaattttcattgtcgcgtagggtttaataaaacagttatatcgagatggaaaaaaattatgtcaactagtattaactaaataacataaaaattttgtaatttaatgattatgaatagttagaacatattattttaaaacaaaaaatattacgtcagctacaggattcgaacctgtgcgggcagagcccaaaagatttcaagtctttctccttaaccactcggacaaactgacaattatgcccgttttattttgccggatatggtctctgctcatatactcacgtgacaaatttttgcaccatatagtgtataatgtaaaaacactaagaaaacggacggaatggacgtagttatgatttttgtgggggatacttttttatgatcttctaatatacaatataatacatagtaagtaagtgcgaaaatttcttaaatgattacataataagtgcatctgaattcaatgtgattacataatctatgattgtagtctgtttctataattcaacatataggctgtctatatatccaatcatagatcttgaacataaacgtttctcctctttctatctttctttctttcccttctatatagtatatgtactgtaatactctaagatagcatacaatatgaattctgatacaccagctgatacaccatatagtgtataatgtaaaaacactaagaaaacggacggaatggccgcagttatgatttttgtttttctagcgcgggccatctcgttttgacattccgtttttttttacaggtccttctcgttttttttcaaccgaatggaaagtttagtagtgcgaagtatttattttttattttttcatgtcttacttgactttttgtcaaaatattgtattttcaaaaataacttttgtaaaatgtcagtagataattggttgtgttgttgctggtctgactcagtttgacacggcgagcaaaactatgtgagtggttagtctgtaagtggtctggttgtcgagatacacccccctaagtgagcaacactgaaatctgtcgtaaagagctgagccgcctaatcatggccattatgtgccacagctaatttcttgctttttaaagcttgtatgtgttctccatggtcagttgtatggtaaataaattttaaatagtggaaaagtcgtctggttgtggagatacgggatgatgtcattttcacactgttactacaatttactatctccactaatagaccccttttggcttctttctaatgcatgggtgcattgccagggtccacttatggtgtaaccggtttaacaatgccagaaaggcggctcgagtgaagtaggtcgcaggggggtatagtgaagtaggtcgcagggggggggtatagtgaagtagtgaagtaggtcgcaggggggggtatagtgaagtagtgtcgcagggggggggtaatagtgaagtaggtcgcagggggggtatagtgaagtaggtcgcagggggggtatagtgaagtaggtcgcagggggggtatagtgaagtaggtcgcagggggggtatagtgaagtaggtcgcaggggggtatagtgaagtaggtcgcagggggggtatagtgaagtaggtcgcagggggggtatagtgaagtaggtcgcagggggggtatagtgaagtagatcgcagggggggtatagtgaagtagatcgcagggggggtatagtgaagtaggtcgcagggggggtatagtgaagtaggtcgcaggggggtatagtgaagtaggtcgcagggggggtatagtgaagtaggtcgcaggggggggtatagtgaagtaggtcgcaggggggtatagtgaagtaggtcgcaggggggtatagtgaagtaggtcgcagggggggtatagtgaagtaggtcgcagggggggggtatagtgaagtaggtcgcagggggggtatagtgaagtaggtcgcagggggggtatagtgaagtaggtcgcagggggggtatagtgaagtaggtcgcagggggggtatagtgaagtaggtcgcagggggggggggggggtatagtgaagtaggtcgcagggggggtatagtgaagtaggtcgcagggggggtatagtgaagtagatcgcaggggggtatagtgaagtagatcgcaggggggtatagtgaagtaggtcgcaggggggtatagtgaagtaggtcgcagggggggtatagtgaagtaggtcgcagggggggtatagtgaagtaggtcgcaggggggtatagtgaagtaggtcgcagggggggtatagtgaagtaggtcgcagggggggggtatagtgaagtaggtcgcaggggggggtatagtgaagtaggtcgcaggggggtatagtgaagtaggtcgcagggggggtatagtgaagtaggtcgcagggggggtatagtgaagtaggtcgcagggggggtatagtgaagtaggtcgcagggggggtatagtgaagtaggtcgcagggggggtatagtgaagtaggtcgcaggggggggtatagtgaagtaggtcgcagggggggtatagtgaagtaggtcgcaggggggtatagtgaagtaggtcgcagggggggtatagtgaagtaggtcgcagggggggtatagtgaagtaggtcgcagggggggtatagtgaagtaggtcgcaggggggggtatagtgaagtaggtcgcagggggggtatagtgaagtaggtcgcaggggggggtatagtgaagtaggtcgcagggggggtatagtgaagtaggtcgcagggggggtatagtgaagtaggtcgcagggggggtatagtgaagtaggtcgcagggggggtatagtgaagtaggtcgcaggggggtatagtgaagtaggtcgcaggggggtatagtgaagtaggtcgcagggggggtatagtgaagtaggtcgcaggggggggtatagtgaagtaggtcgcagggggggtatagtgaagtaggtcgcagggggggtatagtgaagtaggtcgcaggggggggggtcgcagggggggtatagtgaagtaggtcgcaggggggtatagtgaagtaggtcgcagggggggggtatagtgaagtaggtcgcagggggggtatagtgaagtaggtcgcagggggggtatagtgaagtgaagtaggtcgcaggggggtatagtgaagtaggtcgcagggggggggtatagtgaagtaggtcgcaggggta

SEQ ID NO: 15 - DNA, 1160968 bp, Pichia kluyveri
  >NCYC246_000004F P_kluyveri_NCYC246_TS
tacccccccccctgcgacctacttcactatacccccccctgcgacctacttcactatacccccccctgcgatctacttcactacttcactatacccccctacttcactatacccccctgcgacctacttcactataccccccctgcgacctacttcactatacccccctgcgaccccccctgcgacctacttcactataccccccctgcgacctacttcactataccccccctgcgacctacttcactataccccccccctgcgacctacttcactataccccccctgcgacctacttcactatacccccctgcgacctacttcactataccccccctgcgacctacttcactataccccccctgcgacctacttcactataccccccctgcgacctacttcactatacccccctgcgacctacttcactataccccccctgcgacctacttcactataccccccctgcgatctacttcactataccccccctgcgacctacttcactatacccccctgcgacctacttcacttcactatacccccctgcgacctacttcactataccccccctgcgacctacttcactataccccccctgcgacctacttcactataccccccctgcgacctacttcactataccccccctgcgacctacttcactatacccccctgcgacctacttcactataccccccctgcgacctacttcactatacccccccctgcgacctacttcactatacccccctgcgacctacttcactataccccccctgcgacctacttcactatacccccctgcgacctacttcactatacccccccctgcgacctacttcactataccccccctgcgacctacttcactataccccccctgcgacctacttcactataccccccctgcgacctacttcactataccccccctgcgacctacttcactatacccccccctgcgacctacttcactataccccccccctgcgacctacttcactataccccccctgcgacccacttcactataccccccctgcgacctacttcactataccccccctgcgacctacttcactataccccccctgcgacctacttcactataccccccctgcgacctacttcactataccccccctgcgacctacttcactataccccccctacttcactatacccccctgcgacctacccccctgcgacctacttcactataccccccctgcgacctacttcactacttcacatctacttcactataccccccctgcgacctacttcactacttcactataccccccctgcgatctacttcactacttcacatctacttcactacttcactataccccccctgcgatctacttcactatacccccctgcgacatacttcacatctacttcacatctacttcactatacccccctgcgatctacttcacatctacttcacatctacttcactataccccccctgcgacctacttcactacttcactacttcactacttcactataccccccctgcgacctacttcactataccccccctgcgacctacttcactacttcactataccccccctgcgacctacttcactataccccccctacttcactataccccccctgcgacctacttcactacttcactatacccccccctgcgacctacttcactaactactctacagcaatatctggccaagtcgcatgaaacacgccatttggcacctgtcagaaaatgcgacttggcaatgcgacttggcatcctcatacaaatttgggaaattttttttgccaattcgctgactttcttagtcttttcttaaatgccatataacgttagcaaaaagtggcagcagctggaaaaaatagccgagccgagagtggtgtccgcggccgaaaaacaaaaatagccgagcaaggtctactttttccaaaatgctttaactaactatggattcagacacttgtacacagtgaagtggggatataattttttttagtgcttctatctatgggaacatgttctcctgtattttttatacatagtatgagtggaaaaagaaaagaaaataagccgtagagggagtaacagccagagataagaaaatcagataagcattctcggacatcggagtagctatctcgacaacgagccgcctttctggcattgttaaacctgttgcaccataagtggaccctgacaatgcacccatgcattagaaagaagccaaaaggggtctactaaagaacatagtaattaacactaatacagtaaaatgacatcatcccgtatctccacaaccagacgacttttccactatgtaaaatttatttaccatacaactgactgtagagaacacatgcaagctttaaaaagcaagaaattagctgtggtacataatagccatgaataggcggctcagctgtttacgacagatttcagtgttgctcacttaggggggtgtatctcgacaaccagaccacttacagactaaccactcacatagttttgttcgccgtgtcaaaccgagtcagaccagcaacagcacaaccaattatctgctgacattttacaaaagttatttttgaaaatacaatattttaacaaaaagtagagtaagacatgaaaaaataaaaaataaatacttcgcactactaaaatttccattcggttgaaaaaaaacgagaaggacctgtaaaaaaaaaccgaatgtcaaaacgagatggcccgcgctagaaaaacaaaaatcataactacgtccattccgtccgttttcttagtgtttttacattatacactatatggtgaagttgcacgtttagttacaactaaatgtgttacaatcacttttgtaacaatcaattagaaactttaactaaataatcatatttaatattataaggttaatattgcgtttctaatgttccatattgttctggagtaaaggtgaccctatattttaaataaataaattttttcatgcatgagaattatcatttatactttaattattaatttaataaccttaaatggtagtttatgttgtatgttttatatttttgagttttcctgatatatattaaacccagctgaaacagatagagttacgaaaagttatgaaaactattagataatactaagtcacagaattagataattacatatgaattacaatactaagttgattaagtataagactttcatatcctctccaagacattaaaggaatttactctgtgtttttctcactgctcactacaaaacagtgcattaaagaatattaatgcctacactaactaatctattagttatattcacttacattaaatccagtctcaaagtagtttatcattattagcaaatattaacattggtaattaattcttattgatgtataaccagtgtttccacataacttactattccaaattatattgtatcattaaaatagatttgtaatgcctcaaatactcggttatttaacaattaaactcttatcaacaataaattgttatctgtatgggccacacacttaaaaaatttaaaaaaaactcatccgaaaatagccgaaatttatgaacgtcaaaaaatcccaaaaattaaattagccgaaaaaatggtacttttttgaaaatgcttttaattttttttgtctagggatcttacacagtgaatttcattaaagctacttaactacacatattatgctattataattcaattattgatagcattagcaagttatataagttatacatatttaaactttatatttaattatttaatttgttaatatttatgataatacattatgttgagttaatgtaaggtaagataaacacactaacttcacaactactatataaactgtatactgttataccaatttatactcaataactacttcttatactcatttatcaatgactttaaaatatctattagttatgaatataaatttcatttgaatataatatctaaaattgttttaaataaacttgaaagatacctttaaatattattgattaacataaattggtatgcatgatatcgtatgactacattcacatattaaatcatttataataattgatgttctaatttccaataaatatagatacttatagatgttgcttctaaatcattttatgaaaatattttatatgtaaatgttatgtattcttttgaattaactagtactttctgaatagttgaaactattgaactagcttcataatagttttggtgaatataatatcagctcattattgataacattaataagataaattaatctaattactcgattgattgattagtaatatcattattgttattgttgttgttgatttattattattaccgattaaatacatttaatcaaataattcattgctatataatagatttatcatttcttactgtttaataccccgtaatcgttaaactgcaaacctttttgtattagctaaataaatttttattactaaattcaaatactgcttggatttgcattcactcattaattcattatcaattaatatacaatttgcaattgaaattaaaaattaattagaacatcatgttagattattatgataatacttgttttagtagtatcatactcattcaaataaacaacaatgataatatattaattcaaatcattttcagagaatcttagatgaacggcattactcatactaatacctacaataatgtgtattcaatgggcagtcaatacttaataaaagaaccaacattcattaaggaaaatactttgataattaacatgttgaaaaatatttactatgtgagggaagttctcttgataaattttaattaactgttttattgacaactctttctttatggatatatctctaaatggtaatataatacaatatgatgctagttttacactgcttgtttctactcgattagatgaaaaattaatttgcttcaaaaataaccaacaaaaatgaatgatttaccagttagatcatagtttatatgaacatccattttgaagtttacaacaattaatcaattatcgaaacgaacactaccataaatgacacaatggatacacttgtttgttttaataggaaacataaactatacttggtgatccacttatcatcattgaagtaataaactaatatcctatttgtgaacctccaaataactataaatgtttcaatttactctttatgaatatcttttattgttttttgttaaatgtttatattattaaacaacactgcattaaaaagattcagatccactttatcaaaattacaataattgcaatcaaattatgaaatactactgttataatgactatttaaatactttgttgagtgtgttataatttcacatttttaggagaatatcatatttgattgggtgtgaaactagtaaatctggcctactacctaaataaaattcagtaagtgttaatatcaaatctattaaaaccatcaatatttattattcatattgttaactgaattatattaattttatatgtagtacactttatgattttgaaacctgaataacacactgggataaccatgtttaattacaatatattgaaaatgaaattgatttaagagtaatgcttcattacttacagaattcagttatatggaacatctggtgagaaatataagacagctaaaccgtatgagatgaaatagattgggaaaattactgaaatactcaacaacactattcattttgagcataggattactcaattatcatcaatgaattatgcaatctaaatatcgttacattaatttgcttaattcatatgtctaatctaagtttaatcatgcactcatcaataactttacattgaatttaatcaaatgataaattttttaatgaaacacttgagcaaaataaaataacattggatagcttaatttatcagtcatcaaaataacactattataaaaatcattttaactactgttaacaaaatggaattatctccagtcaataaatctacttatatatgcaagcaaaaagaacactatacaatcaaaacacaagaaataataaccagctggtaataattatgcaactatctttcttaagatattaaaatttaatctgaaatattgcaattgaattaaataatgcattctatgaatcttcgtaattaaattaaatgttcttgatgaatcgccatcatatgtcatatcaccaattctatcatatttttgaaatttttgaataattattaatttatgttaaagtgttgttcttttactaactaattctgaatattaaaacaatagaaaatggtgaatatttcactataagatataatttatcaaatcaatattaatcatttcatagatttattgcatgatgtgattaatatacaacctcaaattaaattaatcaaagatttgcaaattcaatattaataaaaataaaatggttcagtaacttattttttttactaatcttaatgttcaattgatggaaatcattcaaatcaactgtttcgaaattacattctttttaattaaccttttgataaattataaatctgttatagaatgacatactgtttctgcatttttacctttgcaaacagacaatgctaaataaactgaaaataatggggcgtataaaacatcttttaacctttcatcaatatcataatcaaacttttgaatcatccatctgtctattaaaaccactttaactgtatcttcgtcactggtacagtgttttgtagaatgatatccaaaacatgtattacacgttataccttgaacacatatttcacaattcaagaaaattttaatatactgtgtaaatgtttcagtaagttcagaataatatgtatctttaaaatatttgattggttcagcagttattgattttctctttctttcaactaactctttccattcctctcctttacgtatttccacatcatttatattcttagaagatagtaatttataaattaagtttgtaactgtattgattgatcatatatataattttagctaatcctgtaagttcaggtagataatgagcaaaaaaaggcaatgtgtaataatttgcaactgtccaaggagattctagataaacattttcatcaatgatatacaatttttcacctttttgatttttaaaagagaacatttcaaataattttgaagtagaatatgtttaatcaattatgaaatattcatcaccccttgcaacatgatcactgacaattttagtttaattgttgaatccacggctatctatttcaatatattgaatcttcatctgtatctgttggatgtacagtcattataaaagaaagtgttcattatgaaagaacaatttgccatcaattaatgatacttcagatcatgttgaaaagagaaggggcaacttaagcgatatttttaattgccctttttccaaatttcctcattttatccgaaaaaagggcacttttctcaaaatgtttttttccaaatggattaaggtatttggcttatagtaaactatagtaaactattggtatttgcttttaataaagtaacctatagtatcttttgttaatttatggcatttatacagctctaaatttattagtttcgtattttattaaatattgaaatataaacctttctaatgatttttaatatttgtaaaataagctagctaaactatttttcaaaatattttctgaaaaaagttgtgtagaaattgtattttgaattaactagacaatgtatcttaaactaattaacttattcaaatgttaaaaaagcctaaatattgcattctaactagtaaaattataagttaacatacttcaacatactatcacgtgacacagtaaattactacgcagcatattaagcatgtaattaaaacataacaagcgcaagtggtttagtggtaaaattcaacgttgccatcgttgagcccctggttcgattcctggcttgcgcagttatttttttaactttcttttttaataagaatctctacttacacgtttatcatttctttttttctgtaacataaaactaaaatgtttctttaatgtaactattctttctattttttcacacattcaacaatcctttatgcaatttgaagaacatccatttcctaaacatgttcaaacaataggagaaaagattcatattatatcagaaaaatgtaaattatctaaacatcaattaattattttaattataattccatttataataattttcggtcaaataatgagttatatatctcctgatgaatcaatacataattattttacttcaaggggtaatctgattaatacatattttgttaaatttagttggttttggacaattgtaacttatctgaatattattataaataaattaaggaaaggttcaattaataatagaaaatttattctatcaatttcaagagttttattaattacattatgttggtatttatttactcaatggttttttggtcctccaattatggatagagtatttctgcttactggtggtaaatgtgttgatgttgattataataaaatacctgaaaagattaaacatttatttaaattgtcaatgtcacaaatttcaaataatgataatgatattgatattgatattgagaaagaattagcatattcaaatcaaatttcttcagctacttgtaaaatttacaaaggtaaatgggaaggtggacatgatccatcgggacatgtatttattttaacattatcggtatgtctattaattgttgaaactatagaattttacacaattgaagatgaaatatttcataatttctttaataatgttataacattaaatcaagttttaaaatctcctatatttatgactatgattgttgttataactgctttaagtatgttatttatgacagttttgaaatatcatagtttgggtgaacaactggcaggattttctgtttctgtttttgctttatggttagttaatagaataattgagcttatcggtctgaataggacatcataatactaatattactgctttatagaacaaatagctttgtataatataccaatgatcaactttggcatctttacgtaatcatgtacataataaaattgataagctaattagttcaatattgattgattgattgatgttctttctttctttctttctttttaatctccaatgaatcattattaaatcatacaacacataaatacaatacaaataatatgcatacaacaaaatctgatataacggcatggtctttaattgcacttgcagctgaaccttatgttgtttcagttttaggatcttatactccaattttattagaacaattagctagagaaaatggtgttttaggtagtgatcatttaactccatgtatatcacatgtaatacctcctataatagatccaaatccttctttaaatataacaactgaagatgttaatgtttgcgttttaccaatattaaatggtaaattttatattgatacatcaagttatgcattatatactttttcattttcagttttaattcaaacaatatgtgttttaacaataagtggaattgcagataatactccttataagaaacgattattagttttgtttggaagtttaggaggtttaacaactatgttatttttcttattaggttcacataattattatgcagcttcaatttttgcaatattggcaaattgttgctttggttgtgttaacgttttaatgaattcatatttaacattgctggttcaaaattatccatatgaaaatattaaaaataataataataataatgaaaatgaaaatgaaaatgaccgtgatgttgatgttgatgaaaattcttcattaatcaacagtgaagatataaatacaattgaaaactctgaattaggaaaagtaagttcaagaattagtgggattggaacaacaacgggatatattgctgcacttttaattcaaattacatcattattatcattaaaatatttaaaatcaattcatgatgatatgatatggtgtgttaagacaattattggatcaattggaatttggtggtttgtttggcaaataccaatcggtttatttttgagaaatatatacaacaagaaattattaaataactcaagattatcaataactaaatcaattaaaaagggttactatgatttattccatgctgctaataaaattaaagatttaaaagatatttatctatttcttttaggttggtttttcctatctgattcaataactacaattaattcaactgcgattttatttgctaaaactaatcttaatatgacaactatatcattagctaaaattggagttttagttatgattagtgcaattactggatcaatattaattccaaatattattattggttattttaaatttgacttacaacatgcattaataggtttaattatttggtgtttatgtgttccaatgtatggaattgttgcattatctacaaatattgaaatgtattgtttagcaatttggtatggtgttggattaggtggtttaagtactgttagtaaaggtatattttcaattattattccaaagggtaaagaaagtgttttcttctcaattttcagtttaacagataaaacaagttcaattgttggaccatttttaattggattaataattaattatttccataatttaagaggtgcattttgggttttatcatttattttaatcattagtttaccaatactttcaattaaatttgatttaagtagagcaagattggaatcacaaaacttcgtctgatagatatatgtagttatatagtatatttgtaatgccaaaatattatacccataatatactttatcaatttattgtagatatttacctcaaaattttaattttttgtttttatctctttgtagctttaatgggacttgatttagtgtaacaagtaaaccaaaatgctgtttatttatcaaatctatgtgttttcctcaaatttgaaagagaaaatgcataattgtttataaatattaaaataattccaaaacaagagtattttgaccaaatcaatgaaatatttgctaaaccttttttaacttctaacatgttttaaatacttttaaaagtattttatccctctaaagagcactttaagataaatattagcaaagaatacagggtaaatcactacaaaatcactataaataaaatctgcttacataagccaaacaatcattgaaaacaccacccctttttatttacaacacttggttgtatagtgtagtggttatcactctcggttttgatccgggcaaccccagttcgaatccgggtacgacctttaattttttttcatttaataatttttttttgtttaaatattaaataaaattctcaataatttttcagtttgaaattttactagtaatttatatcgacatgactcacttgtaatacttttcttcaaaagatttcattattagtataacttacctttaggattaaacaactcaacattaaaaatgacagattgtcaacctgcattcccacaatttttagaatatgttaaaactgatgaagaatcaaatgttttcccagtttataaatttttaagtgcacattatctaacaccacatactgcatatttaaaattagttggatcacaggaaactccaactgaatcattccttttcgaaagtgcaacaaatggtgaacaagtttcaagatattcatttatgggtattcaaccacgtaaaataattaaaactggtccaactgaacaaaatgaaattgatccattaattttattagaaaaagaattatcaggtataaaacaagcacaattacctggtgtaccaaaattaagtggtggtgcaattggttatatttcttatgattgtattaaatattttgaaccaaagacaaagaatgatgatttaaaggatgtacttaaattacctgaatcatttttaatgttatttgatttaattattgcatatgataatgttttccaaagatttcaaataattaataatattcatattgatagatcaattgataatgaaaattcattaattgaaaaatataataaagcatcaaatgaaattgaaaaaatttccaatattttaaaatcaagtgaagttaaatatcctgaacaaccgaaaattgagaaaagtgaagattttacttcaaatattggtcaagaaggttatgaaggttttgttcataaattaaaggaacatattaaaaagggtgatgttattcaagcagttccatcacaaagaattagtcgtccaactaaattacatccatttaatatttataatcatttaagaactgttaatccatcaccttatatgttttatattgattgtttagaatttcaaatagttggtgcatcacctgaattattagttaaatcagattcaaatgataaaattataacacatccaattgcaggtacaattcgtaggggtaaaacaattgaagaagataatttattagcaaatgaattaaaatcttcattaaaagatcgtgcagaacatgttatgttagttgatttagctagaaatgatattaatagaatttgtaatccaatgacaactaatgttgatagtttacttcaagttcaaagattttctcatgttatgcatttagtttcacaagttagtggtattttacgttctgataaatcaagatttgatgcatttagatcaattttccctgctggtacagtttcaggtgctccaaaagttcgtgcaatgcaaattattagtgaattagagaaggagaaaagaggtatttatgcaggtgctgttggtcattggtcctatgatggtaaaacaatggatacttgtattgcattacgtacaatggttgttaaaaatggtacagcatatttacaagcaggtggtggtatcgtctatgatagtgatccatatgatgaatatattgaaacaatgaataaaatgaaagctaataataatacaattgttgaagctgaaaaattatacatgtaattatatactatccttaattctgtaactcttttataacttattaatattaatacaataagaatttgattattataaaatagatttttgaaaatgatgaaattcatgtaatcgaggaaatgatttattttttatcaattttgccatcatgaatcttctttctctaacaaaccaaggcaaagcaactaataattatgtcaaatcaacaggcaattgatgaatttgtgggcatcactggtatagctacttctgttgcagaacaatatcttgcaagaaatgaatatgatgtgatgttagcagtcaatgattattataataatgaacatgttgaaccaggatcaaaacctgaaacatcatcaaatactaataaaagatcaacacaatcaactggagctaaagttaaatcattttcagatttaaataaaagtaataataattataataatgatgattcagatgataatgatatgaattttttcacaggtgggcaaaaatcaggattagcagttgaagatccaaataaatctaaaaatggtagaagtttagttgatgatttaatcgaaaaggcagaaaaagagtctggagaaccagattggagagaaaatgataaaaatgatgatacacaaaattcaaagaagaaactatttaaaggtacaggattttcattaggttcaattgagaatgaaattaattcaaaaactgtaattgatccagaatcagccaatgaagttaataaacctggtaaagttacaagaacaattacattttggaaggaaggttttaatgttgatgatggtgaattatataaatatgatgatccacaaaatcaatcatatttaaaacaacttaatatgggtagagctccattaagtttattaaatgttcaaatgtttcaagatgttgatgttaatgttgttaaaaaattagatgatagttattatgataatcaaaaatcaaaacctagagtattcggatttcaaggtactggtaatagattaggatctccagttcctggtgaaccaatatctgttgaagaaagtaataataataatacaacaactactactagtattacagaaccaactaaacctatagaggaagaacaaatcggtgatactagtattcaaataagattagcatcaggtgaaagaattgttcgaaaatttaattcaactgatttagttgaagaaatttataaatttattgaaaataaaactgttgattcaaatagatcatggggggttgtaacatcattcccaccacaaccattagatgaaaagaaaaatttaagtattgcagaagcaggtttaaagaattctgttgttattcaaaaatggttgtagtagtatctagttgtataattttttaaataataataataataataataataataacctagattgatgtacttattacaaactacaatttacaagttttttttttgaagccgatgttgaaatcccattatatttatataaagatagaaaaaataaataaattaaaagataaaattaaaaatacaagtaattttgtttttgagtgatattatttttattgtttttgtttttgtttgtgtttgaaatttgttcgtttatcataaccagtatgacattaatgttgaataaatgtcatatcatcaaaataattagtaaaaatttagttaaaaattaaattaatgacatacttagttagagtacttttctctatagtactttgcagcttcaaccatattagttaatgaagctctagtttcttcccaacctctagtctttaaaccacaatctgggttaacccagaatttatctgctggataaacctttaagatttcaccaattctagcaataaattcttcctttgatggaattcttggtgaatgaatatcaaataaaccaagaccaatatgatttggataattggagaattcttgaatatagtttggatcatccttctttgagaattcaattgagacaacatcagcatctaaagctttaatatgatttggatctaaatcagaataacagaaatgagagtgaatttgagtagaatcttcaacagcagaagttgcaattctaaatgattctgcagcccaatttaagtaatcagatctttcagcacctgctcttaatggtaaaccttctctaatagctggttcatcaacttgaataacagtaatacctgctttttctaaatctgcaacttcatctcttaaagctaaagataattgatatgattgaactttttgagtaacatcatctcttgggaatgaccatcttaaaatagtaactggaccagttaacatacccttcattggttttttagttaatgattgtgcataaacagattctttaacagtcattgcagctggtctatcaacatcaccaacaatgataggtggtctaacatatcttgaaccataagattgaacccaaccattagtagtgaaagcaaaaccatttaatttttcaccgaaatattgaaccatatcatttctttctggttcaccatgaactaaaacatctaaaccaatttcttcttggaatttaacaactaattccatttcagcattaatgaatttttcatattcttcagcagtaatttcacctttattaaatttatttctattaattctaatttccttagtttgagggaatgaaccaatagtagtagttgggaaaactggtaaattatatttagccttttgagaaactaatctagttgggaaatcagatggtctctttgccattgaaggatcttctaaagcagaagcagttctctttctaacttctgggttattagtaattttagattcttttcttgatttaattgcagcagcattagcttctaattcagcagtaacatcatcaccattaattgctttagagataacaacaacttcattaactttttgagtagcaaatgagaaccaatttttaacttcttcatttaatttcttttcattatttaaatcaacaggagtatgtaataatgaagaagaagttgcaactctaactctttcattaccaactttagcaattgctttcttaacaaattcaattgaattttcaaaattatttttccaaatatttctaccatcaacaataccaacagataaagtttgttcaggagttaaaatctcaacaacttcatcaaattgttctggagttctaacaaaatcaaaatggaaacctgaaacaggtaatgatttaattgattcaatatttggtctaacatcaccgaaataagatgctaaaacaatttttggtaaaccttcagtttcagagatagttttataagcagtttggaaagctttttgaacattttctggtaaatctaaaactaaagttggttcatcaatttgaacttcctttgcaccagcatcagctaatttctttaaaatttcaacatataaaggtaataatttttctaataaagtaattggttctaaatcaagtgaatctttatcagatttacctaagaataaataagagactggaccaactaaaacaggtctagtttcaatacctaaagcttttgcttctaaatattcatcaactggtttttgaccatttaatttaaattcagttgaattagagaaagttggtctaacataatgataattagcatcaaaccatttaaccatttctaaagctggaacatcaactgccttagtagtttcagttgcctttctttgtaaacctcttgccattgcaaagaaagtatctaaagttgataattcatatttagtatatctatctgggataacattaaataagatagataaatctaaaacttgatcataaaatgagaaatcatttgaaggaatgatatcaacacctgcttctttttgtaatttccagttcttttctctgatatctttaccaacttttaataaatcatcagctgaaattttacctgcccaatacgcttcggtatttttctttaattctctgaatgcaccaattcttgggaaacctaagacggatgaagaaaccattgttaattaattaatagatagttttctactgaaaggagagaacctagaaacagacagaagaatcaaaacaaaataaaagaagaaaaacctaacaaatgagccataacttcaattcaaaatgtgggaaattgccttcctttataaaccactgaaaaaaaaaaaacgtcaaattttttcgtccaagtgaaaaatgaaaaatttacaatgtgaaaaatttactattagctgagaatgtgaaaaattacttgttatggcagaattgccaatttgggtaattatcggcgggtaatacacatttattggtatctaatacaacttcaactctttggttatttgatcaatcactgctcgtggtgctggtcctaaccctaacactgttgcactgccactagcgatctctgttctacctgcatcaattactaaataattggtaatattaagactaactcccttcattaataattcttcaatctcttcaatatctttacttcttaaaacaatcttggcacatcccccttcttcccatctatctaacatatacctattactctcacttatctgtttatataatgatactgctgcatgtgaacattgtgctgcaactttacctggtgacatatttaaatcttccctcactatcaataccatccttacctcccctggtacatagttattctccttactattcacttcaattccttccatctttcttttaatcttctatacttaacctatattttaaccttaattaacacaatttaacccccctgaatttactaatttaattcaatataataaccaattttaattaattttccactattgcacagcctagatcatgtgaattttgacttctgatttctatacgatcgtataatttctatatacgatcaaatcctcttaatacttctattatcaatatctatctacaaatctataaatctacatgtttaattatcatttcaagacaatcttatcctcaattgcatcaattgtaactatcttagaacatattatcctatctccaatagtaatcttattatttaattccatatctaattcaacttcaatatctttatcaacccaatatccaattatacgttctttctcaatcttaataacaatacatctcattaacgtaaattcattatctttattaatattagtgccatcactaattatattcttatcattctcttctttttcaatatttttcaatatctcatatctattaaatttattaataatttcaatataaccttcactttgtgaaacacatttattaaaatgttcttcagtaactttttcaagtctattaggatcccatttaatatctatattattatcctttaatttctcaattgtttcaataattaaatatctaaacaattgccataaatttaaatgtgtttccatgaaattatataatgtaaatgatgaataatattttaaccccagtggtaaatatcctttttgtatcatactattattgttattgttaaaattaccatcaatactcatatttctattacttatttgaacttcacatttacctaaaaatgataaacatccaactaatgcagttaaatctcctggatttgaacttaattgaaatccaaatgtttcatatgaatttgcataccatttgaaaattttaaattttttgaaaattctataatcaattgaattattaataatcttatttaaacttctattaattacactaatctttttatcattacaaaatcttgataaattttcatcaataactaaccttaaattatcaattatccattttttatccttaaaaatattctcatcatattgatcattatcattcaaatgtttatgatttatttctctattattaatattatttgtaaaatatcttaaattatcatcatttttatcaaaattcttataagttttcaaatatcctaatcttatcctagatttttccttttcaattaaaaaatttaataatttatttaatgataaccaacaattcatttttcttttagatccatttaaattcattacatttctattaacaaaccattcatcatcagccttttccatagttttaaaacaatcaataccaactttaatttttggattagttaatgaattagaatcaattaaattatgtataaaggataatttaatacatggttgattgattctaattgaatgattgaaaaagttgattttagggaatgaatccaaattacctttagtatctttatttaaattaattggttcctgtgttgttataaaattatttggtgattgatcaggtataggaataaatatattaaatttatacattgtcattgataaataatcgacagaaaatgcaatattatcatctaatttgtaaattgtacgatttttaggaatttcaattggttctgtataattatcattatctgtatcaccctgtatataattgacatctaaagtattattatcatttaagttatttttatcatgatttatattttcatcattccaaattattggtaatgatttattaatatatttaataaatgaatctgaaaaatttctatttctaaacttattcttttcattggtttcagtgatttcatcagttttattaatctcatcaatattatcattttcaatcaatttcaatggtttaaatgatcttaaatgttttggtaatagatcatttaacatatttttattaaaagaatattgtaattcatttatattttcaattactaaagatatatcattgatatttttaatattaaaaccataaataccacttgaaagtattggatttgtatttaaattataaataccaatctctattaaataattatataaaactcttgcattaatctcttcttcaattggtaataatttggataatttattaaaaattttattatttggataaataattgaatatcttattaataatattaatcttttaaaattttcatcactcttataaatattaaataattggaaattatttgattttttcaatatatcataataagctctatttattaaatcattatgttgaatgtaaatgttttctaaattttgtgataataaaattggattgagaaaataatttgaagttaattgatttaaaggattgagattattattataattattattattattattgatattattattgtttaaaaatctgaaatgaattggatcattataaattaagaaatgaactgataataataatgaatgtataccaaatggattaattttaatattagttaaattttgaattgttttagaatttgcatataattgatttgtaaaattaattaaatttagagatgattgataattaatttcagcatttttaaaataatttgtccttattaaatccaattgaagtagtttatttgaaatttcaatgaaaaataataggaaaatgtttaatgttaaagttagatgaattaaattagttttagagaattgaacattgatatcatttatattggtaatttttagtaaaattttcatttcactcttatttataaattcatcaattaagaaaattatatttgaagaatcaatttcaattatattaccattaggtaagagtacatttaattttataaaatttgataaactataattaatatcatttaatacaattccaaaattagtgtctaaattgttatttttattgttaataattttaaaatgaatgaaagaacctgatttaggtattaaatttggaatataatttcgtattgatttaatatgattaattgtatttgagaaatcaatttgatttttttgagaattattattattattaatattatttaattcattttgaagtttaataatattttgatgatataaatttgaatgaatgttaaaagaataatttaagggagtaaatattttattattattattatcattattattattataatgaatatgacgacgataatgaatattataatttttatatcgtacaaaatttttcaaaatggaacaagtgtacctattagacaagaatattatcattgtcaatgtgttaatatgtgtgttttcagatagagactattgaataacttatttgatgttgaatataatattcatgctaaatatatttgaaaatatatgatattaatgattatgtaattctacaagaaaaaaaaaatattattacgtaaagtaaagtgagtcaagatagattctatacttatacttatacttacccagttacttaacagttagttactcatctgattaaaagaaagagataataaaagcaaataaagaagaagaagaagtggtatgtaaatgtaataaattaaatttgccacccaatttgccacccaatttaattattataattattataattgcccctttcctaaaagagtaattaataagtatgattacataatcataaaattacgtaataaacggcttacataatcacataacattacgtaatccacatcggaaaatcacacctaccaatctactccaaatttccggaaagagaatttttttcttcccactagtgaaaatttttccttcctcccctatcactttcactatcatcgtttttttctctctctgagtctcttctatttcgcctccacattgtatacattgcttgttttccaattgtttttattttcttaattttcttattttaaattaaaatttttttctttctttataaaaattttatatatttaatataacataccacatatataataacaaataacaaataacataataatataattaaatatgggacagattttatcacatcctaaaactgaaaaatcatctgaagaaggtggtgatgaattagttgcttatggtttatcttgtatgcaaggttggcgtgtttcaatggaagattctcattcaactatacttaatatgagtaaattatcatcatcatcatcaaatacttctcataattctttctttgcagtttatgatggtcatggtggtgaaaaagttgctattttcactggtgaaaatttaccaaaaattttatctaaaaatgaaaattataaaattggtaattataataaatctttaaaagatactttccttcaaactgatattgaaatcttaaatgataatgaattatcaaaagatccttcaggttgtgctgcaacttcaactttaattacaaatgataaaatttattgtgcaaatgcaggtgattcaagatgtgtactttcaattaatggtattgttaaacctttaagttttgatcataaaccaactaatgaaggtgaaaaaaatagaattgttaatgctggtggtttcgttgatatgggtagagttaatggtaatctggctttatcaagaggtataggagattttgaatttaaagattctaaaaatttacccgcagaggaacaagcagttactgcattacctgatattttagaacataatttaaataaattaaatgatgaatttataattttagcttgtgatggtatttgggattgtcttacatctcaacaatctgttgattttgttagaagatatattaaagaaaaaaaatctttaattgaaatttgtgaattaatgatgaatacttgtttagctccaacaactggtggatctggtattggttgtgataatatgtctgtttgtattgttgctttattaaataataatgaatcattaaatcaatggtatgatagaatttcatcaaaaatttcagatgatgatttaaaaaaattaccaactgctgatgaattatcaattgatttatataaaattgatattgaaagtaaattatctgaaaataaagttgatgaaaagggtaataaaggtataacaactaagaaaaatagagttaatgatgatgatgaagatgaagatgaagataatgatgatttattaaaaggtggtgcaccagcatttttacaacaattattagctgcatctgctgcttcacgtggaactggtgaaaatagtaatgttatatatttagatccatcatcaacttcaattttacaatcattaggtgttatggaagataatgatgatattactcatgaaattgaacaagaggaagatgaagatgaagaagaaactgaagaagataataaaattgttgaagtttctgatgataagtaattgattatatcaagtatatgatcatttaataataataataataataataataataataataaatttcttagtgtatattataatgataatcatgtttatcatattttatttcttaaatattctcattctgtgtttgtcaacttctttccttcatattcatattcatgttcattcttccaaatcaagttcatatttcatattgcaatttcaattttaaattcatattcatattcatgtattaatataatctataaattcatgtttcatgttctgcaatgtttagtttcctattttctattttctattttctattttctattttctatttctatctccatattaatttccttttcttttcgtttgtaatgcgtttcaaaatctttttttcatataatatatttagattattcaatactaataagtatattaaaatgatactattaaattttttttctatcaaacattttataaaaaaaactacgttctctctattgtatccatttcaccaaaaacttccatactatttttataacaattatcaattaaaatttcaggttcaattgctaatatttttgaaacaacttctgcaactaaaccaattaaacaaggttcatttcttgatttaattaatggagtttcattaaataattccatatattgaaatttattaaatttatcatgtttaataattggtattggtaaaaattcaaataatgttaaagaaggagattttttcgattgttgtgttaggacttgatttattttattatttgatgtgatcttctcataattttcataatcagagggataaaatttattaggtgattttgttaaaaatttataagatggatgagttttcttaatttcacaccaaggtgaatcagtttcaatcattaatctattaattggtattaaatgtaatgaatcaattgttgattgatcacgtaaacttgcaccattaatactaatgaaaattttataatcatttttctctaaatcaaggagttttatcagttcatttgaattacctgtaaatgaatgaactaataaatttttattttttaatttattattttcaataaaaggtttaattattttaataaaatcatcaactgctgatctcatatgtaaaaataatggtaaattaaatttagttgctaattctaattgaatttgaaaatattttaattgtttatccattggtgtataatgtaatctatcataatctaaaccaatttcaccgaaagctttaacaatatttaattttaaaccttcaataattaaattttctaaattttgtaaatgtttttcaatataagtattaatatcttcattttcattttcactttcattttcaaattctaatacagtacaaggatgaacaccaacagttgaataaaggttaggtatatcatttaaatgatcatcatcatttcttaatttcttaactatttcaattgtattctttgattcaattaatgatgaaccagttaataaaatatcattaacatgatgaattaatgatttttttaaaacattaataatatcattttgattatattttttaccatgataataaccatcaaacattttatcagtaatattaacacctacatcgaaatatttaggtatataatcagaagttgcctcttttgatattgataaggttgataatgattttgataataataatgattgagatgatgtcattttactgataatcaatttgctcattaatttttattaatataatacaatcaatttcgatgatcccgagatgagtaaacaaagaccagacagaaaaactgacgaatcatcaactttgcaaaaagaaacgagtggctagaaaacagattgatgcacccgacgaacaaacccgagctaaggcgctagtccaaaaaaaattttgaaaaagtcggcagaaaaagtgcgggccgtgccgacggaattggcaaattgcaagaatggcgaaactagcgagattagcgttgaaaagcgaagagagaagagctgccctgtcaaaatttggaaaatttaagctctttagcatagcaaattattcaacttgtgatattttattggctattgattatcattatcattatcgtatcgtatctgatcgtatcgatagatatatgcatctcgtctttttttttgttaatgtcctatatattaaattagttattataaaaaagaaaactgaaaactgaaatcagaaaaaaagaaccaaaagtgtaaacgtgatgtaaagcagattaatgagtgtatgtattagtaaaggtatagtatataatttgtgtatcaaacactgttataatatagtttattgattaataaatgaataaacttgtgaaagtgatggtaatttattaccacttggtgtagttattgaattaataaagaaatgattattagaaattggtgttgtattaccagtacttgtatcagtactagtaccagtactaatttttttatcatcatttaatgttggaagtacaattgctgatgtttgataaactgaaaatggttgttgttgttgttgctgttgttgttgtggataatatggtttattactatttggaaaagtatatgtatcaatttcactttcaggtgtatttgaacaagtatttgataaatttggtatttcatcattacaattagtattagtattatcaattaataatgatgaaatacttaattttttacgttctaaaaacataattctatttttaatttcattaattgttttctttggtaataaaattgataattcaactgttgataaatttttagaatttcttgatctaattaaattatcctcttctaatgtccaatataagttattattattattattattattagtgttattaagaattaaaggatttttaatatcattatttatagccgtactgttattgtttaaaattctattagagattgaaatttctgaatttgattcatcatcactctctttattattaatatttgataaattttttaaattaattgtagtattcttagaaaatttctttaattgaccacttttcaaacgacgccatctaaattgacaagcatttgaagttctattattaaaatatttagcaatttgtttccaacctaaatgttgaatttcctttaattgaattaataatttatcatcattatcatcccaagattgtggagaatttttaattttaatactattatttgaagtatttgcagatgatgaatctgtattgtatataatattattttccatagtgtatgatatttgataataataatcaaaagaagaataaatttaataagataatgaaaaagagatgagaagagaagagaacaattattaagagaaatgaaaatttgagggaatagttaaagtatttaaaggacaaacaaaagaagtattaatgttttaatattgataaaaaaattgatatgattgataaactattatgatgtaaattaattaatgacaagttaatgaatgagatgcaaatcaaattacaattaacaataaataaattaaaataaacgtaaagacctcttcctcatacggtgtttagaagggttctgctatcggaactttcccttgattattccattcttgtttcatttcatttcatttcattccattctaatttgctatttctctttctctttatgtttatgtttatgttttactattattaatatacactatagttacatagatctactatattctttactacattatactacaagagtcagtgttctaccaatatatcaaagaataatttccaaacatgtgaaatgtgaaaataaaataaaataataaaacgggaagtcaattccgacaatcaatgcgatgacgcttattttaaaccgtcggaacttccgtatacgctagtttaacgcttccgtcatttttaattttaattttaaatttctttttctttagtgctagtactaaactttaaaagccacactatcgatgatcatctcttagtataataccttattttattttataccccctcccctctttattagtggacttccatttcctaatatggtaatcattctcctcactattacgatattaatttatcaacaatttcaataaacatatcaggtataagaacaatacctgatctaccaaatgataaataactcatctctttaatattctccctaattaatcttgatgcaatacctgatgcaataccttttaaatctaatggtaatttctttaaatcaattataattggataataataatcttcatctaatgatccaattaaattcttattactataatttaatttattcttatcatttttattaaatggtattaataatccaatttcttcagttggtgttctagttattgcaaaatattcagggaatgacctattattattatcactaaatttctcggtatttaatttagatatattctctgctgtttgttttaatatttcaagtgaatctccaattcttgcacccgttaatgttaatttaacattagtatctaattttggtttaatattattattatttaataattcaaatgtcttattctctaattcaatttgtttcccattgtcttcctcatcattattatccttcttcttttcatttaatatattaattaccaattctttatcctttattggaactaaaactaaatctgaaaaataattacttataaagaataatgttatattatttaatgataatggttgggtaatttctaatattttttcaccaatatttaatccatcactgaaaacttgaataatgaaaaattcatcattaattaaaattgattctttatctaatttaattgcattagataaatattttttaattaatttactacaacacattaatgtaacttcctctgatgtaaatgctaaatggaaaaataattcatcatcaatttcatcttcattatcactattattattattactcatattattattactatcatttgatctcaatgatgatgaatcattatcagaatatcgggaatttgatctatcatcatatgactccgcaattaaataaattatctctaatataccagatttgaaaatccaaaaattctctctaggtatagtaagaatacttatcttactgttaaacagttgtgtctcgttactatcaatcattgtcttaagaaagaaatgtctgtgatctagtatactttcaaatacaaaactacttatatcacaatttatacaaaataaaattcatgtagttactcaattagtcataataataataataataatagtcatagtgaaaaataaataattttgaataaaatttttcattacgtaattattttcataaatttttttgaaaccgttatctaacacggggctcaacacctattttcactattcatcacatcatcctctgctaagtttcacatctgattccactctatacgctatgatctatatataaaagagtagcatttccttctaaattcattatctcaactacatttttcttatacaatgactaatagtaataaaacaagtacaaaatctaaattcttaagattctttaaaaagaaaacaagtttgaaaccactagaaataccatctccattacctactgctatacatcctcctccaaatcctttaacattaaatataaaatcctcatatagaaattttgttaataatatggataatccatttcttgatccaaatagtgaacttaataacaataataattcattcccaattttcaatgatagtaaaaataaattaaacagatcaaaatctgttaaaggtaaaatatcatcacttaagaggaaacattcattcaaattaaatagaacaacaacaaaagatacccacacagataatgaatcttatactgatatttataatagtttatttggtgattattcatataatagttccaacacatcaattgtttcaaataaagagaatatcttaccacattcatatgaattatcagaatcgaaaactccaaattattcaattacaccatcaactcccaaacttcaatcaagtccagtatttgttaataattttaattttattaaaccaccacatgaagttatactttcccaaattaatgaaaataagaaaaatgaaactaaaataaaatttattaatccaaattcaatgaaaaaattatcaattcaatcacctcatcctcttagatcattacctaaaactccaatatctaatggtcaatttaataatccaatttattcttcaagtacattaaaatcttataatgatttaataactgaagaatttaatgataatgaattactagaggagaaaagtttattcgatgcattaagtaatgttgaatggtgggattgttcaaaaataagtttggtacaatataatgattcaaacaactaaacttcatcatcatcaacctcatcttcttcctcttcttcctcttcttcatcatattcctcttcttcaccatcataatcgttatcatcttcatctgattcttcatcattcggttcatcaattatttcttcttcctcctcttcttcaaatatatcacttatattaacaacttctatattactttgctttccatttataccattatttatttcctttatatttattaaatctgtattcttatcaattttttccttaatttgatttggattcgaaacttttttcaaacttttgataccggggaaacataatctataatcattcaattcatcatcattttcaatactattttctttattttgatctaaaatcttttccattgtttgatcttctaaatctctatcatcctctaaatcatcctttaaaaaattaacaataactgatatatttttcattaaattaacactcatattagtattaatcatattttcattttgatcagttaaaaccattgttgaatttgtatttatacctcctgatggtcctaatataataggtttccaaacaagataatccttattcaattttattgtatctcttttcataaatgaagtataaatctccttaactaatgaataattgaaaatcagtgcatatttattaatatcatcatctttatttactgttatcagagaatttaattgttcaagaccaacaatcacatcatcgtgtgccatacctgttaaatttgataaatcatcaattgataagtaaagtttctttaaattattcttattatcaacatttttgatcaaagtatcactattttcataaaaaaatttataaatttctttaatgatggaaattttccaataatttctataacttaataaacctaaatgacttaaaggtttctcaggtgtacctaatttaaattctctcttggataataaataactaaaatcaattagaaaattcccaaatcctcttctttgataaattggtaatgtcataatacatgataaattatatccagttgaatttaatttctcctttgaaaaatatccaacaaatttaaaattttcatcattagagaattcatataatacatagaaaataaatggttcaacatcataatataaagttttagaattaagaaataatttggctaacaaacataaattttgacaaaaaataacatttttcctaccatcaatttcaaaaattgaaactttttcattattatctctataaatttctctaccgtttggatgtctctttgatgaacatttaattgaatgtctatttaatgtaaatgatgaattaaaatataataaacaatgaggacatatatacattattgaatttgaattgaattcagttggatacggagatttataccatggttgaatttcataattatcaaaatgaattacttttaatttattacttgaattaggtatactatttgaactgttattaccgttattattattatcattaatttcaatgagtttattttgagaatgttttagtttaatgttattggattgtaaaataaacttattgtaaagtttcgtaaaatttttatcaggatttgtatcataagtattggcatcatcaaaatcaaataatcccctataaggcagttctaatagaactgattcaaccttagggtatgataatgatttgttctgtaaattacctgtattggatgatgtggaaactggtatcgatactgatcgtttacgttttctttgattagatttattgtttacattaatttccttatcagttgatgaattatcaattatatcaatagaatctatatcaagtgcaatattgatatctgatttggataatgactgatgtctgcgttgtggtttagaggatctacctatcattatcagagtagtctgttaaaagaagagtgatagagataaaattgaaataaatgtgtgaataatttcctaattcgtcaaagtcagcattttttcatgtcatcagctttgtttgatctttttctttagactttttctttttattgatggtaaagagacaataaaaggacaatgagtgaagactaccacaagggacgcccaagggaaatattccggtattcatgtactggtgaaaagttgtcgtttgattacagagaattacatacttattatttaactgaaaatttaagacctggacctcctaagaatggtaattcacgtccaatattaggattgaaaggaggaattgggaattataatcgtaaagtgtttactgagaaagaatcaaagataagaatgtttttattgacgttgttggtatatgaaagtattaataatgtaagttatcctattgaggatacgatagataagaaagagattgaaatattagcacataatggtttattcacagatataatatcaaaatcatgtgaagtttacaatattatattatttaaaggtagaatgatatttgccaatacagcaacaagggtaaatcagaatagactttactcatatattggagttaaatttgaaagtattgtttgtaagactaatgatccaatagattcatcacattgtaaactacttttaaagggaaaatatggagaatggagatttaaatcagttgttgaaattgatggatttaagagatatccaagaaaaaaggagaaaaaaattgaagattttcaattaaaggaaagagctcaaatgtatacggaaatgaaactatgttgtatatccgatgattctaaacttattgaagtggataatataaagaataagagagagtttatagaatttttagctaaaaatgtcaaaacttttagacttaaagttaaaaaatggttacttcaaagttattttggtagacaagatatattagttattggaattagaaatgacaatatgaagcttgtatgctatgaagagattagtttgaagaatgatttacttccatatattaaaaaacattataaaaatttatatgaatcatttgttaatagagaacgtatattaaatgatgcatttaataaaatatatgatcagattatagaattgagaaatgatgaaaaagatgtatttattcttgatactagggcattagaaatcaagaaagttgaagaaggaaatggagacggagataatgagctatttaataatatgttaattgaggaatataggagtaaaatagaaaagaatgaagatatattagatcaatgtccaatgattaaccatgaacaatttaatgagttgaaaatgaaagccatgactgataaaatgaatgaacttacagtgtccaatgatgacgataattaagctggttttacaattattgacacagattaaccatttatgtatattcgattgtgaaattaacttattgcaaagtttttgaagaattttaacacgatttgtacatataatataagtatttgcaccgttaaaactaaattatcttttaacagacaaatcaaataaaactgaagctgcatacatacatgattaagtactgatactgatactaatcgcttgttggtaaataaaatctataatatttcctaattcgtcaaaatcgttgttttttcatgtcgaatttttgttcattaagagaaggctcagtttctgtttgtagcttttttttttcaagtacatacaataatggaagattacgacaagggacgtccaaaggaaatattccgatactcatgtagcgacgagaagctatcgtttgattacagagaattaccttcctattgtttaaatgaaaatttaagacctggacctctaaaatatggtaaaaaacgtccaatattaggattgaaaggaggaattggtaaatataatcgtaaagtgtttactgagaaagaatcaaagataagaatgtttttattgacgttgttggtatatgaaagtattaataatgtaagttatcctattgaggatacgatagataagaaagagattgaaatattagcacataatggtttattcacagatataatatcaaaatcatgtgaagtttacaatattatattatttaaaggtagaatgatatttgccaatacagcaacaagggtaaatcagaatagactttactcatatattggagttaaatttgaaagtattgtttgtaagactaatgatccaatagattcatcacattgtaaactacttttaaagggaaaatatggagaatggagatttaaatcagttgttgaaattgatggtttcaggagaaataaagaggagcaaaaaattgaagatttctcaataaaggaaagggctcaaaggtatactgagatgaaactttgttgtatatccgatgattccaagattattgaagtggataatataaggagtaagaaagaatttatagaatttttagctaaaaatgtcaaaacttttagacttaaagttaaaaaatggttgtttcagagttattttagtagagaggatattttagttattggaattagggatggaaatgtgaagcttatatgttatgaagagatcagtatagaatatgatttaattccatatattaaggaacattatgatgaattgtataatttattcatcaatagggaaagtacattgaatgatgcattcaataagatatatgatggtatgattgcattaagagaacatgagaaggatgtatttactctcaatactaagacattagaagttaagaaagttgaaaaaggaaatggatatggaggaaatgaattgttcaatgatatattaattgaagaatataggattaaaattgagaagaataaagatatattgaaacaatgttcaataattaaccaagaacagtttaatgaactgaaaatgaaatctatgatcgatgaaatggataaactcatacaatttctaaaggtgtaggaaatagttgagtgatttaagacataataatatattataggagataacctataggaatgtttcggagatattacgtaactgtattaatagaagtgtattaatagatagatctatcgatatatcaaccaattaaccactactgtggctatttgcataggatacagtagattcaataagtagtatagagtatcatacacagatagattgagataccaataggaaataaaggaaataagaaggatatataagttaatagctcaatgccatcagtatatccgtttatacccgtctcttttcttcttcttaaagtactttctttctccatttctctcttcttcttacacattacaggtcaaagatacccacagtagatcatacactactacgtctcctactctgttactttactatacacgcatactctgtgtataaacatcccaggacattggaaataccacccatttcataggcgggcgttaagataataaaataaatttatataatacaaggtaaattcccgaagagcgaaaattatccccacgcaaaatacttaacatctttaatttaataaatacttctcaatcaactgattagtaatttattattttattatattatattcttaataaacatcatggattcagatagatataagtcagaggagattaacgaatcttttatctctcaattcttagatcctggtgtatcaaatggtgatgtcgattggttattccgtggtagagaagttaaaaaattaactaaacattcaaatacaattaataatgaagttcaatctcaattattacaagctcaacataaagctctattacaggctaaggagaaagagaaagaaaaggagaagcagaaagaacgtgaaattaattcttcaagtacaaatactagttcaatcagtttacaaaacttaaatgatcaatcatcatcatccgatttaatgactaattctaacagtactacatctatgaataatatagcaaataatcactctcactctcactctcataattcatctcccttaatgataccacttaaacaatctgatgtacctctaaaatcttcattaaaatcttcatcaatgtcgtcatcatctactgcaacgcgtggtttgaaaattgatacatctattttaacaaataattctccattgaatttaaattcaccaataaatgatccaaaatctagtacatttccaacatcttcatcaattaactctaatcataatagtaatattaataatattaataataatatacaaaatacaaaattatcatcaacaccaaaagaatctcaatctcaatcttcatcaaatccaacttccacagtatcaacacctgtaaatagatcaagatcatcttcattgtttagtcgtcaaaaagttacctccactccaacagattcaaaaccagttaaaaaatctttattatcttcattatcttcaaaattgaaaggttcaaataatgtatcaaattcaatattaagtcctcaacctacatcacctgtaattaaatcaccattagttaaacctcaaacacccgtcaatagaacttcaacaccaccacaaccaccaccacctactaaaccatctccaacagttactaaaccaacaacttacccaacacaatcaatatcaatacctaatgaacctataaataatcatcctaaccctactcctgataatgaattaaataatttaatatttaaacgtgtttgctttgcacttgataaattaactgaagatcctcaacaacaaattccttcaagaagaccaaaaaaaggtgatgttttaatacctgaagatatgttagctccacctccaaaactttcaattggtataacaaatagtttcaatgaacaaacaaaggatcaaaaacctaatgttgatccaaaattatatgatgatgcagttatgagacataaatattttcaacaagaatcaatgaaacatgccaaagaagctcatattgctgcaatgagaatggcaaatgaggtttcatcatttaagaaacgtaaaaattcattacttaaatttggtgattctcataatgctagtgaagatgatgatgatgaagatgaagatgatggagagttctcaaaatttggtaataatgatgatcatctggatattgataccccacttcatgaacatgttaattattttggtagtcatgataatgatgaaagtaatgaaaatgaaaatgatgatgatgatgatggtaatgatgatataaatacaaatactgaaatctcattagaaacactttatacacgttgttgtcatttaagagaaattttaccaatacctgcaacactgaaacaattaaagaataaatcaaaacctttacatattttaaaaatgcttaatcctaaaccaacattaattgatattttatcattttcagattttttggcaatttcccccattataacagtcatatttgataatgttacaattgatagtgaaatgttgaaaattgttttaattagtttgaaaaattcaactcatcttgaaaaattatcattaagaaatgtaccaattgatcatgaaggttggaaaaatttatgtaaatttttagaaactaataaaaatattcaaaaattagatatttcacaacaacgtctgaaaaaatcaactgatacatcaaaatcaataataagatctgaattaaattgggatttattagttgatacacttaataaaagaggtggtatcgaagaattagttataaatggttgttgcttgaatgttaatcaattcaataatttaattactaaaggattatccctaaagactaaaagattaggtttagcatcatgtcaattggatagtgaaaaattatatttattatctaaatggattgcatcatcaaaatctacatgtattggagttgatttagcatttaatgatttctctcaaggtcaattaacaaaattcaataaagcattaacaaagaagggagaaaggatgaaattacaatttatttcattaaattcaacaaatgttcatttaaatgaatgtactgaattaattaaaaatttatcagttttaccaagtttaagatttttagatttaagtaataatccacaattatttccaaatattttaccaactttaagagattatttaccaaaatttattgatttaagaagaattcatttagattttaatgaattaacagaatctgcagttgttcaattatgtttaatttttcaaaattgtttaaaattagttcatgtttcattattaggtaatgtaattacatcaaagtctcaattagcattatattcagctgttaaaaattctcatatttataatattgatatgaattatgataaattagatgatgaattagtttcaaggattgcattttatttgatgagaaatatggaattattccttaattcaactaatgataattttgataatttgagaaagaagaattcgaataaaaatacaaataatgatgataatcatagtgaaaagattagtagagatgaagatttaatttttgatggttcattattaactaaagctgcagaacaattacttgaaaatgatgaaaattttaatggggaagaacgtaatattattcatcattcattagttgaaaagacaattaaattaagaaatgagattcaaacagttatgaataaattattctcagccagagaggaaggtaaattaacaactgaaggtaaagaaaatttattaagattttgtttactagaagattcacttgaaaatattttagatatatttgctgatgaagttaataatgataataataataatgatagtaataataatagtgatgttactaattcaaataatgataataataataataataataataatgattcaagacctgatatgattagaaaattatcatcacaacttattaaacatcattcaacacaaaatgttttagaaggtgatccaattattcctaatgatgatttctatcaaaataatgatgaattagttccaaatattgcaagtgaggaacctcatattgttgttgaagatgctaatagtgttcctgttgatagtacaactggtaaacgtgttttaattagaaattattcacaaacaagtattcattcaaagaaattagaggaagaagaaggtgaattacatagatgggggttctttgttcaacaacaaaatgatattatgcctgatgattcacaaagtagatctgaatataataattctagttcaccaatagatgatataattaaaagggaaagagaagcagcagcagaggaggaaagaattagagttgaagaagaaaaagctaagattgcattagaggagaaattaaaacttgaaaagaaaacattaaagattaatccaattccatctggatctgaattaagagaaactattatgaaggcaaagggtattgaaagtattaatgatttaattaaaaaagttaataaagattttacaactgttgaaaaaatttataaacatgcagatgctaagagagcaattagtcaagaaactgagaatgttgttgataataagttaaccaataatgaaacagtttcatcaccaatttcaccaatttctaataaaattgttgatcaagctaatattagtaatttatcattacatgtaatgaatcaagggattaatgatgattataaagttgacgattcattaattgatgaaaatccattatcaccaacattaagtctgaattcatttaaagatgatgaatttactgaacaagctgatgaagtttatgatagaattttaaacaatgttatcagagttcgttcaaataaataattataattaaataaaataacaatacttttctaacatttttataaatacctaatattattatattcatttttttctagttaatatcaactatttttaattctcttttaaatccaaagtataaacttctttgtaaatttttgattgatgaattcaatgaatctaatgtagtatcatcataagttttaagtctattcaataatgacattgatgtagatatatctttatcatttaatggaattaaatcagaatactttacattattatcgaataatttagcacccttaattatcatatttgaaacacacggaagacttgtattattattcattggttttgaactatattctaatgcaatcataaatccataaacatctgaatcaaaatatccatatattttacatttgttaaatttaatagttaatatgttaataaaatgttttgtaagtctatctggataacctcttgcagtaattaatattgaattattgaatttttgagttaaatgtttattacttttctctatattaattaaacctgataaaatagcatctttctctaatataattattgaatcaggtgaactattttcattattattgaaaattattttagaatcagataaagatgaagataaattaattacaggtataagagttgatccaattgatttagaaattttataattatcaatggatagttcaccataaattaaacctttctgtgaagctattatatttaatttttcaattgataaattaaatgataatgcaatattatctaaacattcatcaactattgtttgctttttaaataatttaacatctgcatagtataattgtcttttagatattatttcacccttaatgatttgagtatgtatgagttttaataatcttaaataaaccgtaaatttccaattgatattctcctttaaatttgggaatgttaaaacagatttccttttcaaaattggattaatatgtagttcaagttgaatataatcaccattctttaacccattttcaattatattgagtattttagataagtattccagtaattcattctggatatggttatcattcctgtttaaaatgttagtattagtttatattatatgtaaatttgaggaggctcagcagtattaaaatacactagaaaaattcattcacatacactctattcaaacaatcttgactaataataacaatacgattagaggtcatcctacagttatctattttactgtttaatttccaagaaaatattgtctttacttaattctaaatataaaacaagatgaaaacaaaatttcatgaaaaaaaatgaaaaaatcaaaaaaaaaaagtttataagctaattattaaacctgataaataacgataaattattaatactaagggataaacaatcaaataatttaagcagaagccttgaattccaagatctttgcttcgactcttgcctttctttcgtctctggtaagtttcttttgtctgtatttctttgattcagcagcatattgagctttcttatcttcagccttaactggagttggatcttctctaattttttcatgtgcttccatgtaaatatcttcaacagcatctgcatcaatatcatcatcaatataagatttgaataataaagaatatctttcttcatcatcatccattaattcttccatatattcagcaacgtgaccaccgaaaatgtattttcttaataattcagcatctaattcttcaccttcaatatcccaacctgggaatcttgatggagaatgtggaacgtataaaccaccatcagaagcaccctttaatgcaccgaaaactttagcaccagttgtagttctttgtaaaccaacatcaaggaaaactttgaatggtcttggagaatcttcaacagcttcagttaattcaaattcaccttcaacttcttcaacaccggtataggtttcatcaagacctaatttctttaaagctcttctagcaactaataaaccagttgcataagcagctgcccagttagttaaaccgtgtttaataccgtaatttggtaattcatgagaatatgcagcagttaaaacaacatcaccagttaaagttgatgaaacaatttgacagataatatctttgttagtgaatctaacaactaatctgtattttggagaagcatatttgttctttgcttgagtaattaatctctttctagcatagtaatcagtcttaccttcagctcttcttctgaaaggagtttggtatctggaaaggtatgcagaatttctggtgaatttaaaacccattttgtttgtttgtctattgagatattctggtagaggagagttctaaaagaattcaaaaaggaaaccttaaagatattaatacaaatataaaatacaatacaataatactattataatacaaaaagtgaaaaaaaattaaaaaatttgaaaaatttgaaaaatttgcgtggcgttgcccaattaggaaaacagggtttctcgtcctccctctctttcccaatgcggtaattagggtatggatggatatacttatacttattatacatactgttgtgtaatacccatttgaaggaaactatccttgctttccatacttgacacgtcaggacaccatctacctgcaaagatacaatgaactgtcatgtcaggtccataataaagatcacttaataatttaggtgtaataaggaaatattgtgatgtacccttaattgaattatctgtagctcttttaacaattaattcatgtgctttacgttcatttttagcatccataccttgattaatttcatcaactactcggaatggtgtattagttaatccttgtaatgaattaaggaaaactgctgtagttgtagatttttcaccacctgaatgttgtgctccattaaaatttgttaattcttcattatctctaaaactaacttgaataattaatttccaattagaataatcattatcacttttatctaatttaacattacctgcactggcaatcttattcatattatttccaaaatcttcagatataatttcaacaatcttatctaattcactctcccattctaaaatcattttccctaattgttcttcacttttcttaatcttttcctcaataattggtatttgaattttatattcttcaatcttaaattcattctcctctaatttctttattgatgtactaccaatatgactatcatttaattccatattagattttaattgtttaattctaccatctaatccttcatgtgtaagtatattctcctctgccatctccttaattatattaccaatttcaattatctcttcatcactatatttacttctctccttcttatatgaactaatagattctttataaattgaatctaattccttatatttagcctttaaatgtcgaagttcattttgtttatcctcaatcatacttccaatagatttatgtatattttcaacagattcaactttattaatttcttcaatcttacgtatctctaatcttaataattcattatcattattaactttctcaattgttaactttcttttatcattaccaataatttcaactttctcctttattctttcatcaattatttcatacattttattcttaatttcatttgtattactattcttcaatgatttaaataattgcttttgagcttttaatctatcttcttgatattctaaattttgttgtaattttttagcccttttcaaaacttcattagatctaataatattatcttcaatggtttcttgttctaaacttttctccttgtattcattatttttttcattataaatggatttttcatctaaaattaatttctcaacttcaccttgttgatttactaatgaattaatcttttcatgaattctagatttttgttcctctgacataccattaacgaaaattgttgatttaagtctaaatgatctaatattagttgtaacttgtcttctaccaaaacttgatctattcattgtataaatttcatctctactaacgtatttaataatatttaatcctttagaaatttcatcactaattatatccttttgttgattagttaaacctttaattgaaactggaattctatgtaaataagtattttcacataacatttgaataacttcttcaggtcctgaaaggaaatctgttacaaatccatcaaatcctaatctaatcatatcttgatgtgaaattctatcattattataattaaatttattaccaattgttctaattgaaaccatacatttacattcatcatataaataattagataatgttgaaaaatcatttctacttggaacaacaactgcatttaaatgttgaaatggaattaatgcttcaactattggtgcaacatttttatcattaacatttaatgtaactaatgcaggttcaaaaaagtttgcatgtaatttagattgtcttaaaagtttaattgctctaagtgtaacttgatattttctactatctaattgattaattctatcagttgaatttaattttttctgttcttcataaatattatatttaatattttcaatttgatttttatatgcattaattttacttttaatattagtaagtgcatcatcaaattctctaacttcatttttaattgttgaacgtttagttttccattcttcaatctcatcaagatctggagtatctaaaatttcaatttcttcccttattttattacattgttccttaaattttttataatcagctctagcagttaataatttattatcataatctttaatttcagagaaacatttttcaatatctttatcaattttttcaatcttagaatcaattttactaaattttgaattaaaatctaattttttattttcacaatctctaattaaatttttaatttcatttaatgattcatcaccaattttcattgcaacttctaaaggttttatattttcataaaataatttatattcttgctttttagtttcatattcttccttacattcatccttttgtcttttcttttcttgataaacaacataagggcgaatcatttcagttttttctaattctttctgtaattttaaaaattgtttatgtttttcaacattttcctttaattcattagacttattttcaagttcaattaaattatttgaaaattcatcaaatttttttttctctgaattaataagtttctgtaattcaataattgacatatgattatttaataattcaccatccccataggaacgttcaatttctttcaataattcatcaggttttaaatcagcaaatttagaaactctatcttgaggtaagaattgacaaagattatcaagttgaatattataagattttaatactttctttatttcaccttcattaactgaattttcattaatcatccattgagttttaccatttctaattaattgagttgtaattgtaattgattcagttggataatcatcaaatgcctttaattcaattgaaattgaacttaaattttgattatcctttataaaattatcagttgacattgattctttacctaaattagctaattttccaccaagaccaatacatatagcacatacaactgttgatttaccactaccattaggaccaataattaaattcatctttggaccaaaatgaaattctgtcaaattatatgacataaaattagaaagtttacatctaatgattgatcctggttgaaaagatgcataatttggaacaaatgacttctttagtcttttgggagtaggaagtccctctgctagatcatagaaatgggtcataatgcactgttctaggagtacttcaccagaataaaccaacaagagcctccgaactgaacatgcatataaattgaattgcccaccagaggaattgaaaaagccaaagagcaaaaactgacgcgttatgctcggaattttcattttcatcgcaaatttgggtgcttttcattttattttatttcacttcattatcatgaatctggatcttttctatggagaaagagagacagtttctttgtttgaaagtggaatattgcagtacatggaccagttatgagtgataaaacatcatcccagacaactgcagactcaaatcatgctgccaaatcttcttcaatagtgttgattcacccattggagaatataaataaggaattaatatatcaacaacgtttaaagagaccatttaatgttatacaaaatttaccaatttccaaggataaaagtggtaaattacctgattataccacattatctaatcctttatctgttaaggatacatctgtactttatacttcattaatagtttcaagatttaattggttaaatcatatatttaatacttattggactaaaagagaacaattaataattggttcaaataattataaaaaggataaaatgtttagattatgtgatgctgaattaaattgtggtgttcatacttttaatataaaattgtttttcttaaaggatgatctaagagagaaagcttttaaagaggaaattgaaaggaaaagagaggaaagaaataagagaaaacaagaaaaaattgatgaaatgaatagaaagagagaagaaagggaaagacttgagaaggagaaattagaaagggaacagaaggagaaagaattagaagaacaaaaagaaaaagaaaaagaaaaggaacaaaatgctttaaaggagaaccaaactacgatatccaacacaactattacaactgatacaaaagttgtagagaataaggataaagctacaattatccctataacgacggacaaaacaaacgaaccgataaaagcgccaatagaaacagttatcaaacctacagaacttcctgaaaaagaatcttcaccgtctgaaactaaatcttctgcagaaaaatcaaccataatagagccacaatcaactgaaaagcctgttgaaaaagaaacaactgaaaactcagccaagccagttgagaaaccagttgaaacacctactaaaaagccaattgaacaagcaaaaactactaaattcacaacatcttctactccaataaagttcaatacaagtcaatcaccatcaactacacccattaatagtgataattcacaaataaaacctaaaataacaaccaaagtattactatccaatcctgaaaatgcaataatgattcaaaacttaaattatttagctaaaaatgatttatatttaaataatttaatgaaagatgttgcaggtggtggtgcaagttctgaacaaatttccgaatttcaaaaatatattcaaaaagctagagctatgggtgatttgaaaaaattatctgataaaattaagaattcatcaatgacaacgactaagaaaggtaaagatattacaatgaaaacatcaatcattaaaaataatgttgaaattagtaaaccattgattaatatgacacctgaggaaattaagaagaaagaggaagaagtacagaaaaggttagctgagatgaaaattgaacacgagaaacaaagattagaaagacaaagagtaaaagaagagaaagaacaggaaaagataaggttaagagaggaaagagagaaaaagaaacttttagagaaagaagaacgtgaaaaggctaaagaacttttgagaaagcaaaaagagatggaaaaggagatgaagaaacaacaaagacaagcagagaaggagaaaattatgttaaaacgtcaacaaaaattaaaagagaaacaaatgattaaagataatgaaaaactaaaactcattgaaagggaaaaggagaaggagaaggacaaattaaacaatgatgtaactgattttatagattatgatgaacttgatgatagaatgggtaaattaacaaatactgaacaaaatgatgatctttggaatgataaactttcaccattacaagaaagatattcaacaaatgcacatttaattttcgaatttactgaaaataatgctgctagatttgaaatacctaaagattgtatctatgaaataattgataatgaagaagattcagataataataatgtatcaaaggaggaatcacctaaggtaaatgaagaaatcaaattggaaaattcaaaaacttcaagaaaatccccatatgttacaatacttgcatcatttttgttagttcataatgaaaaagaaattaaaggatgggaacgtagaagagaggaagaggaaaaagaaaaattagagaaagaaaaagctgccgctgaagctaaaataaaaaaagaagaaatagaacaacaacaaacacaggataaaccaaataagaggaaacgtaaaactgcgaaatcatggggaactaataaaagagcaaccagagcatcaaaacaagcaaaacaattagaaaatttaagacgtgaagaagaaaattattttgaagaagatgatgaattgaggaaagaacaatcaaaaaatagtaatgatcgtaatgaaaatagtgatgttaaaccaatacctatttattcaccattgactgttaaatttactaaaatacctttcagattttcaggttttatcactaatagtggtaattcacccgaggttagtagagaaaatatgaaaattataatgaatcttggtaaaagagttccattagatcaattatggtatcaagttgatggtatcaatgatgaactattagctgaaactttacgttataatcttaatagattagattatgcaaattcttcacttaagaaatcaagaattatattccaaaagaaatttggtaaaggtggtagaaataactgaaaattttatcaatagtttaataatatgcaatggttaaaattgatagtttataaatgttatattatatataaaatatatttatgcaagagaaggttttcgttattaaaattttgtattattaactaacacttattttcaaacctttcgagtactcatcattcgttgtcgtagtagtttcatcattaaaagtttttttaggaatattttccttattctctaagttatcaccattagggtgatctttattagtatggattgaacttgaatcattactatttgacactaatttattagaacttgtcatagttgttgtagttgcttgtgtaataactggtaaagcaggagatgctaatgttaatcttgttattggattattatcaggattaatcgatactccagttgatgtaattattgaactagttgttgaaaaatcattggatgtacgctgagaatgtggcaatgatctattaactggtacaataaaatcatttaaattatttaatgaattatttctattaaaatttggaggatttaaattagaagccatattagaatctgaattagaattagaattatttcttaatgtaacagctaatggatttcttgttggaacaataggtgaggcagctattacatgctcattgatatcaccaccattgatgatattgttgacattattgttattattattagtattattgtaatcatgtttcattaattcacttgccaaacttgcaacagttggagaatgtgaaatattttgtcttgtaattttaatagcatcagctgaaacattaattgaagttgacatttgatcaagtattggatgtggatagccaaccgatgattttgtcacattattactgattttagaaatattatcattaaccttattgtctttattagaagtatcattattagaatctttgttattattattagattcaattttaataaatgcagctttagtttcatttcttgaactatttgaatcttttctaattgttacaggtaaattattattgtttttattcaaaatatttgataaattcatatttgagacacttgcagtcattttactgataatactttcatctaaataatttttaaatctcatattagcagttttctcatctaataacattctactctcaaaaataccaggtcttgaaccatcaattttcaatgaattttcatattcaataccattaaataaattaaataactcaactctataacctctacttttagaaactggattaccagataaataaattgatgttatcataactttttccttattaattaataataaaggttttaaatctgtcactttgtaaatattattttgtcttaaatcaattttagaaagtgaagacaaattttcaattgaatcaatttgagtaattttattacctcttaaatttaacattgttaatttttttaaattttttgggaatgtttgggtattgaaaagtttattaaatgataaatttaaggttttcaaattaactaattttgatagtggagcttcaggtatttgagttaaacgattgtatgataaatccaatacggttaaattaattaaataatcaaatgaacctagtgaaagtttttcaattttattttcagttaatgataaatgttttaataaagaccaagatgaagggtttaaaccagaagtttcagaatcaagtaatggagattttttcaatttagaataattatcatttccaattgaactatcaagattgatgttgctgtgattatgaatatattgatgttgctgatggtgatgattactattgttacttgaattattataaaaattgttgttattattattgtaaatatggttgttgttattattggtattattattattattattactagtaattttattattgtagatataattatgatctacttcatcactttttctactctttgaatgagattcatgatagttaatagatgaatgagaagctattggggttgataaagatgttgaacctcttgatcttcttgatttagtatgaggtttataataataagatcttctagttgaatttacagatgatgataaaacagtttgttgagagttaactacatcttcagaatataatcttgttggatgataactaacagccgatgatgttggggaagttgaaatactttgtaaataatcatgattgttataggtattattattattattaagattattattatgagaattgtaagcatgagaattatgaatatgaggtgttagtttataatgttgattcaaactataattataagaatatgggctatgagaatgtatggaaggaattatagattgagattgtaataaatttggagaagtatgattatttttactatttaataaatgagttgataaatttaaggttgaatgagaggaaggaatatttgaattaaattttctatcatttggatcacttgaatttgattttgattttgttaattcattattatcatattcataatattcatcatcataatgtggaaatttattatcattaaaattaatatcattattactattattgatattcatattattattattattactattattattttccattgataatgaatcatcatttgatttaattgttgaatctgcttcaactaagtttataaaaatttcaattggatcagttatatttgcctttttaaccactaaatatcttaatttagttgataatatatgccaaccaaaaatttcctttggttctaaatctgaaatttccaaaactagtaaatttttgaaaattacaattggagttgcagtttcaaaaggatattcttgatgaccttcaattaattttgaattttgttcatttgctaatcttagacaaggtaattttgagaaagctgaatataaatattttaaatctgatacggtactatcaattttagaagttgaaccaaaattattccaaagtgctgaaactgatgacataacagatttaacagatgaaattgaatgaattgattgagtatcagaatctaattttttatttctttgaaattcacttaggaaagagacataatttgaatttgaaattgaatcaatattttctaatcttaaattcattggaccaactgggatacctaaatctttaaatcttccaagaataaaatataggtgatgtaaagatagtgaaagtcttacaggttttgaaatttcctttgttaatttatcttcttcatcaattgatatatttccattctgtattgagttgttattattagtagtagtatctttgctgtctgtattatttgattcatcagtatcattcttagtattagtagtagtgagagtattagtattagttttattattattattattattattatttgtagttgaatttaatttcttatatgcaaccagggcatttgctaattgaggctcatgagatttaataaatgaagataaattatgtatataaacatcaccatcacaagtattcttacccatctttcgtatattgttatattatagatatatatagatagatttatttatagaaagggtatatgatatgatatgatatgatataatatgatataatgcacaatataatatgtagtatgtggcaccttatttttctaattctaaaaaagcaaacaatgagcagtaagttatagaaaaagggggtatataatggtccctatacggggttatttaaatgtgtatataggtaataaaatagaaataaaacgtcttgttcaaggaagaactcatatataatcataataatatataatcatcaacatcaaaacataaacaagtaaacaaggcaatttttagattttttcaaattttcaaagtgcgggtattttatatagtatagacattacgtaatgctttgagaagaactacctacacgtctgctggaactggcaagagttatcactgacgatgctgtagctgctgcattggtgtatgtggtatagttggtatgtgtagtgtaggatgtagctgccgttgatcctgaattgattgttgttaaggctggtgatgtgagaacagaatatgatgtgactgctgatctgttggatttattagatttagttgatttagttgatttagttgatctaactgatctaactgatcttgtagagatgaatgagtttgggtatttgctttctctatcttcatgtggtattatagtgtttgtcaaatgacggggatgattgttgttattattattattattattattattattattattattattattattattattattattattaatagtactagcagtattattaccatcatcaatttcttcatctgatgataatgaaagtaatggttttgtacttaaattatcatcatatgttgaaccacttaatatactattattatctccacttacctgcaaatgttggttataataactatgaaacagtgaaactggtttattatgtgaaataattgaatttggtagtgaatgtgcaatagattgtggagatgctataatatgaaaatgatttgaccctgctcctgatcccgaaattacatcactatgatcaaatgaaattggactttgaataggtctcataatataattagaattggatattgatactgatgttgaatcattagaatcttgtcgatataatggcgtaattgatgtcattgtaatagtatccatattattattattattattattattattattagtattttcattattatcattattattattattattatcttcttcctcatcataatcatcatcatcaaggttatgatgattactagtataaaaacatctctcttgattttgtttaactctcattgacgtacttgatgatatataacttaccatttcatcattttcaatactagttatatcattcaatggatacaggaatctattattcctcgtattattattattattaattattgatgatgcaccagatgatgaatctgtattaatgtcagaatgatatttaggaaatattggtctcttaacagtaccaccggtggtactttgatcatttctaacatttttagtattcttattatcccttgcaaatctgacaactggttttgatgacatatgttgtgcctctgtttcagtacctggggtaataagtctcttaacccatgaaaatcgtttattcttctgactatgtgtcttgttatagttgttaccattcccaccaattccattattgttatgactgttactattaccacctaccctatcatgactgtcctgcatgtctgatgtataataccaactgataaagaaccaccttccccttaataacacaaattactaaacgacacaaattttgttgtaaaaattattttttttttcaaaaatttttttttctttcccaaattaaaacatttcttactgttagaatagctgtatcttttgcttccttttgcggttatataacacaacacagaggagtatacacttataaatatgaagattaagaccatatctcgttctgctgatgcgtatgtaccagcggcaaatacaagagaggctccattaagtagaaatatgaatcctgaattacatccttttgaaagagcaagagaatatacaagagctgttaatgcaacaaaacttgaacgtgtctttgctcaaccttttgttggtacacttggtgatggtcatagagatggtgtctatgcatttgctaaaaatttctcatctgttaataaagttgcaacagcttcaggtgatggtgtaattaaatattgggatgttacatcaagagatcaaactttttcatttaaggcacatcatggaatgtgttcaggtctggtagtttcaccaaatcaagaatcaattctttcatgtggtgttgataaaactattaaattgtggaaaattaataatgattcagattataatcaaaattatgatattaataataaaaatgaaacaactacaagtacaacaggtttattgaaaacttatttagcagatttctcattaatggcattagatcatcatcagactgatgatattttcgttactgcaggtgctaatataaatttatgggatattaatagaaataaaccaatctcaaatttatcttggggtgcagataatatttcatcagttaaatttaataaaactgaaacttcaatttttgcaagtacgggttcagataattctcttatcctttatgatattagaactaattctccaactcaaaaaattaaaacttcaatgagaaataatgcaataagttggaatccaatggaagcttttatatttgcaactgcaaatgaagatcaaaattcttacctatgggatatgagatatatggataaatcattaaatgtcttcaaaggtcacgttaatgctgttatggatgttgatttttctccaactggtaaagaaattgtaacaggttcatatgataaaactttaagaattttccaaactaataaaggtcattcaagagatgtttatcatacaaagagaatgcaacatatatttattacaaaattttcaacagattctaaatatattttttcaggttctgatgatggtaatgttagaatttggagaacaaaggcaaatgaaagatcaggtccaaaatcttcaaagaaacgtgctaaggaagaatatgatgaaaaacttaaacaaagatatgctgatatgccagaaattagaagaattgcaagacatagacatttaccattatcaattaaaaaatcaactgatattaaaaatgaacaaattgcaagtattaaacatcgtgaagagaatcgtcgtaatcatagtaaagaaggtgaagttccttatgttcctgaacgttctaaaactgttgtggggcgtgttcataaacaataacttaatttagttaaataattaaatagatcttttctctgtatattatatccatttcctattacattagtattgtattcaaataccttctccttgtatctattacaacagtccataaactctgataagaagacaccttcatgttgggttgaaaaattctgaaatttccgaattttccgatagctatcatgaatttatcattatcaatccatgattcattatatcagaattaatcatcaccaatcgtccacttttcttctcgactatcaagcaatatctctcaatgggaaagattagaattgcaattgatgtatgttaccataattgctacttataataaacattttactaacattttttttatttttttcttttgatagagaggtggaactttcactgattgtattgggaataacggtagtggagatccaaaggatgattatgttatcaaacttctttccgttgatccatctaattatgcagattctaatttagaaggtataagaagaatacttgaacatttcactaaaactaaaattccaagaggtgatccaattgatacttcaatgattgaatctttaagattaggtacaacagtggcaactaatgctttgttagaaaggaaaggttctaaatgtattttattaacaactaaaggttttaaagatgttttagttattggtaatcaaagtagaccaaatatttttgatttatcaattaaaaaacctgaaaaattatatgattcagtaattgaaattgatgaacgtgttactttagaggattatgatgaagatccaatcaaatataaatctactgcagataataaatctttatttaaaggaatttcaggtgaaattgttagagttattaaagaagttaatgttgaagaagttagatcaatgttacaattagcatatgatcaaggtataagatcaattgctatatctttaatgcattcatttacatatcctaaacatgaacaaattattgaaaaaattgcagaggaaattggatttactaatatttcttgttcaagtaaattatctccaatgattaaatatgttaatcgttcaaattcatgtgttgccgatgcttatcttacccctgaaattaaaaaatatttgaaaagttttgaatcaggtttaaaatttggattgaaaaatcctattaatgaaaatgataatggtgtttcatgtcaatttatgcaaagtgatggtggattggttgatgcatctaaattttcaggtttgaaagctattctatcaggtccagcgggtggtgtggttggttattctcgtacttgttttaactatcaaaatccaatacctttgattggttttgatatgggtggtacttcaactgatgtttccagattcggtgaagggaaattcgatcatgtctttgagactaaaactgcaggaatcataattcagtctcctcaattggatattaatacaagttgcagctggtggtggctcaattctctcttttaaaaatggattgatgcaagtaggtccagaaagtgcttcttctcacccaggtccaacttgttataggaaaggtggacctttaactattacagatgctaatttattattaggtagattgatacctgaatattttcctaaaatatttggtaaaaatgaagatgaatcattggatattgttaaaacgaaggagaatttcgatattttaacaaatcaaattaataatgcacatgaatatttggatgcaaaatctccctatgaaattgcttatggatttttagaagttgcttgtgaaaatatggcaagaccaattagacaattaaccgagggtaaaggtcatgttatatcatctcatagacttgtaagttttggtggagctggtggtcaatgtgcagtccaagttgcaactgttttaggtataaaggaagttcttattcataggtattcctctgttttatctgcctatggtatgtcacttgctgatgttgttgaagaattacagcatccttttataattgaatttaaagaagaaaatctcaatgttattaatgaaaaacttgaatcattaaaggaaacaacaactgctaaacttaaatcacaaggatttgaatctgagaatatttcacatgaagaatatttaaatttaagatatcaaagtactgaatctggtttaatggttccaaagaaacctgaaggatttttagcaactttcaaagaaatgcatttaagagaatttggatttttatttgatgaaaagccaatattagttgatgatattagagtcagatcaagtgggaaaattaatattgaagaagatgaatcgattgatgtacaattattaaaacttcatgaatctaatggctttattgaaccaaatcctcaaagattgaagtttattaaagaaatctactggaaagtcaatggagaactcaaagcattaccaacagagatatacagattggaagatcttaaagttggaacttaccttcatggaccaggaataattgcagatggtacacagactaatgttattccaccaggagctgttgtaactgttttaaaggcacatctgtttgttcaaatattagatgaagcttccaaaatggaattagagattgcaccaacatctgaaactaaaattgaacctgttttattatctatttttgccaatagatttatggatatagcagaacaaatgggtaattcattacagaaaacatcagtctcggtaaatgttaaggaaagattggatttttcatgtgcattatttgattcatttggtaatttagttgcaaatgcacctcatttacctgttcatttaggtagtatgtcagcatgtatctccaaacaggctgaactttggaaaggtaaattaaaacctggtgatatattaatttctaatcatccatcagctggtggtacacatttacctgatattacagttataacacctgcatttgataatggtgaaattatattttttgttgcatcaagggcacatcatgcagatattggaggtttattgccaggttcaatgccaccaacatcaaaggaattatggcaagaaggggcagcaatttattctgaatttttagttaaagaaggtaaatttcaagaagagatgataattgagaagctcttaaatgaaccatccaagtatccgggttgttcaggtacaagaagattaactgataatttatccgatttaaaggcacaaattgcagctaatcaaaaaggtattcaattaattgatacattagttaaagaatttagtttaccaacaattagcgcatatatgaaagcaattcaagataatgccgcaaatacagttgagaaaatgattaatttattactggaaaagaataaggataaaacacttaaatgtacagattttatggatgatggatctcaaatttcattatcaatttatcgtaatatagataataataaagttatatttgattttgaaggttcatctcctcaaacatataacaatttcaatgcaccaactgcaattacatattcagcaattatttattgtttaagatgtttagttgatgaagaaattccattaaatcaaggatgtttaagaccgattgaagttaaaattcctaaatcatcaattttatcaccagatgatgggtgtgcagttgttggtggtaatgtttgtacatctcaaagaataactgatgttattttgaaaacatttgatgttatgtcagattctcaaggatgttgtaataactttacatttggtagtggtggtaatgattcagaaggtaaatatgttcaaggttttggatattatgaaacaattgctggtggtcacggtgcatcatcaagttgggatggtgtttccggtgttcatactaatatgaccaatacaagaatcacagatgcagaaatttttgaaagaaggtatccaattattcttagggaattttcaattagagaaggttctggtggtaacggatttaggaaaggtggagatggtgttattagagatgttgaatttagagttccggtaactgcttcaatattatctgaaagaagagtaattgcacctcatggtatgcatggaggagaagatggtgaaagaggtattaatctttggattaaaaaatatattgatgaaaaggatggtaaaattaaagagaaaatatttaatcttggaggtaaatcaagtgttgatgttttacctggtgatagaatcattatcaaaaccccaggtggtggtggttggggtaaaataggagaaggaaatgatgattatagtagtaatagtttaaggaaaaggacattatctccagttggtagaggatctttagataatcgtaaaaggcaacaatttgagaattagaaattagattaaacataaaattaaacataaaaagatagtttgtatctataaaaaagacattatttatagaaaaaaggtttaaatttgacaaaattattcgaataattgaagaacactatgtaatttaactaacatttcatcccattcaccatcatcagtacttaaaactgttaatgcaccacctgcaccacatctataagtatcataaccattttcattacataaatcatcagaataacggaaaagagatctaataatgacactccaatcagcattattatttaaagaccaataaccacaaatacctgaatataaaccacgacgttgatttttttcaattttttgtaaaatttcaactgatctcttctttggagcaccagtcattgaacctggtggtaaagaatttttcaaaatatcaatacctgtaaattcatttgtaaaattaccttcaataactgaaactaattgataaattgtttcatattcttcaactgtcattaattttgtaacttcaattttatcaagtaaaaataataaattatctctaattaagtcaacaatcattaaattttcacctaattcttttggaattttcaataatttacaagctttttcataattaatatttggatttttctttaatgtacctttaattggtctcatttgacaaaatttattattccaggaaataaatctttcaggtgatgtagataataacattgaagaattaaaatttagatatgcactataaggtgaaggattttttttaactaaagctttataaatatcccaaggttggaaattatcaggtatttgaacaattgtattataagttaaacataattcgtatgaatcacctgaatgaaggtatttttgacaatcgtggaaacttttaaaataatcatccttgttaggtatagtaatttttgattttttgaataattcattgttaataattgaatcattaatgttgttatctgatttatttagtattgtttcaatatttttaataaactcattatcattttgtctaattgaaactatgtaaatattatttgaaggtgataatgcaataaatctatcaataaagcaaaatttagtatcatctatattatcatttttagttcttttctctaaattgtgaatatctataaagctaccttcttcataggacatatagcctataataccaccaacaaatggacatgacattaattctaaattttctattacaggattaaaatatttatttgacatatattcagataaagatttgaaaatatcatttgtgtgtttctcttcaatttgttcatcattattccatttggagaatttaattgtatttggattttcagttgaatgagtgataacatcggaaacatttacttgaggtaatgcaatgattgaccattcaccaggtgcagaagctgaatttaagagcataacatcttgattatttgcctttaatgtatcacaaatttgtaagatatcaaattttgaatcaaccggtttataattaaggaaattatattcaaaatttgataattctgtagtaaatttttcaattaatggataagatttaactaaatgaggttcaattttaggtaaaggtttagtatgagcttctttatcaactaaactccaaaaatttttaattaaatttgaaccaaatgatgaacaaattgattctggatgatattgaacaccataatgtggatatttgatatgttttgtagccattaaaatggaatcacctgtagtttcattattatctgatggattataaatagctaatggaataattttctttgaattatcttgtttaacataaatggaatgatatctaactgaatctacaaattcaggagtatctttaaaaatatcatcattatttaaaactttaattttatgaatttgaccatgaattggattatttaaataatgagttgaacaatcatttaaaagacaaaaaatttgaaatccaaggcaaatacctaaaattggtaaattagtacatttctggaaaatataaggaataactccaatatctaaaggatttgaaggagatcctggacctggaccaataacaattgcatcaattgagttcagtaaattatctaaacttaatttatcgtcctctatatttaaatcatatgaatcattatgaatagtgattacattagcattagtagttgaagtaattaaatttcttagattataagtgaaggagtcataagaatctaccaatagaatggacatagtgccgttctaacctgctgaaaaggaaacaccattcagattaaagtgaagtaaagtaaagtaaagtactttaagctgatgaaaaccgttaagtgtggcagtgagaaaattttcaaatttttcacatttgacagcattagaagaacccttgatttttattattatttttatttaacttttcattcttcatttcttatttataactggtgtatggatagatcatagagtaagagtaaatgggaagtgaatatgcgtcactaaattactccaattgacggctataatggaaaacagtacaaaattaacgtttatttctattgtccatactgtggaattacctattccagtaactgccgcttatcagtatctgttatcttacttaattgataattataatatttataagatagaatatatttacatatttactttccaattatctctctatcttacatctcctcctcttataaacaatgtcacaaacagttttggtcacaggtgcaactggtttcattgcacaacacgttgttaatgaacttttaaagaatggttataccgttataggtactgctagaagtgaaaccaaaagtcaaccattgattaaattgtttaaagaaaagtatccaaatggtaatttatcatttgtaatagttaaagatatttcaacagaatcagcatttgatgatgttctgattaataataaatcaattacaaatgtaattcatacagcatcaccattttcttatggaattgataaatcattagaagatgcttatttaaatccagctgttaatggtacattaaatatacttaatgcaatttataaatatgcaccacaagttgaaaatgttataattacttcatcatttgcagctttaaaacaatatggtaatgaatatacaactcatattcatacaaatgaaagttggaatccaattaattgggaaaatgatgttaaaactgaaaatgatggttatagtgcttcaaagacatatgcagagaaagcagctagaaattttatgattcaacaagatccaaaaccaaattttaaattaacaactgttaatccaccatacgttttcggacctcaatgttttgatgattatgttagtaataaattaaatacatcaaatgaagttttaaacaatataactaaaatagatccatccaataatgagccacaagttgttttcggtgctttagcaattgatgttagggatgttgctaaatttcatgtattaccattatcaaatgaaaatttacaatctgaaagaattttcctaacttctggacctgtaactgctcaaaatgtattaaatataatgaatgaatcatgtgatccattaaagggtaaaatagctattggagatccttcaaagactaatgaaataattgaaaaaaattgtccaaaatatgatttatccaatttaaagagtattataggtgattatgaatttattaatcttgaaaaatcaacagttgatgtctttgatcaatattataaagttaattctgtttagctggtttatcctttgtatcttttcatatctttttatatctttttatatctttatcactattattctgaaaaatcacccacgacagacttcttgttgtgtgtttccacccatactatttaacaatatccatatttatgctcttatgggcattcaatcactcaaaaactactcctagtatactctagtaggtaaagtatcatattcattaagttaaacacttatatctgccaattaactaataaaataaccacttaaattattacagttgagccacctaaaaatggaaagttaacaatattagaaagtaattaaggtaatatgtaaaaacagcatgaccaataactacaaacacaacataataaaagtgttttacttcaatttatcactacttagaggcatcaaatcattatctaacaccataataccattaatcctgtaataaatacaaaaaagaaacaatttactatacatgacactaccactacatgaataatttttcaacatctcttctcataaagacggacttattcttttcacaacaatttatctaatcaacacaccacagtatatactatgccagtagataaaaagacacaaactataacatcaacaataacaccaccatttggtgataaatttcaaatagctgcaatattaccgattgaacaacccattattgaaactggtaaattacagaaaattccaatttcaatacatttaagtaaatccggtactaatacaccattaggtagttatatatattcaattattaatcatagaaatgatgaagtttatcaaacattattaaataatagtgaagaatttttagttgatatgggaatgaaaattggtagattaataagtaaaaaatttaaggtaccttcatatgttagtatttcaggtaattggaatatagaagaattacttatgacaattcaattaacaattaaattcatacaagagagttatatataatatattaagtataagtatactatttaaaatctttataagaccatttttcagtaattttctttttacctttcttacctttagtaattcttctagtttcaatcatacccttactttggaaattcttcatttgatcatataataaattaccttcaggttttaattttcttaatgaatcacttaattcattacttaatttaacttcaattggaccttcaataacttctaattttgaaccaagtttctttttacctttcctaacaaatctttcatgtttactttccttattaagtaaatcaatattattcttagtttgttcttctgattgttcaatttgttttaaaatttcaggtaatttctctaattctttaattcgaagtttaatatcttttaattctttctctaatctacttctttccttatgacgtttttctttatttctcttagttttagtcttaatttcaactttagtaattggatttattgataatttaatatcaatttcttcctcctcttcctcttgaaccggttctttttcttcttcattattctcctcttcaactatactatcatcaatttcttcaacttcattatcttcataatttttaattaaaaattgtattttatctctatattcctctaattctaatctttgatcttcctttggcttttccttaaaatattcttgttcaattaattttttccaattatcaaatgatggattataagatttacctgcatgaggtaaaatttcttgtttcctaacttgaattggtgcttcctttaatgtcttcggtataactgttgcttcagtaaatgatgttgtactattattttgtaaaaaatttggtaatttattacgtttaatttcattatctaattcagtttcccaaacatcatatgctttagaattaattataccttcctttgctaatctttcatcacctttatcataacctttaactttaccagctaattttaataaatgaaccatttcctttttactaacaccttgaattttatcctttttacttttaccaattttcgttaataatggaggaattttactcttatttgataaaatttcacttgcttttaattttttaatattatctctctgtaagataacatttgcattatcatcagcatcttcatcaataatgaataaatcttcactatcaacatcatttaaaattttaccatgttgaattatttcctctctttgttcctgtaatttagtttcaatatcttcaatatcaacattttttctccatgcacgtctacctttcttagacttttgtccagagttctgtggtctaccaacactactcattctgtttgccaaaccaaaattggaaaaagaaaagaaaaattgttataattttaggaaaagtgaaatttttttcatgataatttttttatcttttctatattaggtaatcttcttgatctatcatcttatattactatactacactcttcacaaatcctgcctagcaatcttaatggcatcaatttactggtcaattaagtttagaatgagtagattacttaataatattagattccttataatacgtaatagaattcaattctttatatttttagctataagtatagtattattcgcattttatggattatcgaatgataatatatttgatgaatcaggttcaataattattaatgaaggtaaaccaaagatgcagaagatgaataaagttaatgatttttcagatattgattatccacaagttgaaaatttaattatattaccatgtcatgggatatttgcacctgaattaaatagtaaaattggtagtaataatgttgatgatggaaatagattttcaattggtttagaaatggataattggttacttgaaccatttcaaaaacaatcagaggatcatatttcatttttcaaacatttagaattatctttattagaattacataataatataggtaattcggcattagttatttcaggtggttatacaaaggataaaattgagaaaagtgaatcatcaagttatttacaattagctgaaaatgttggatttttgaaaaatccttattttaggaaaaatactaatattttaattgatgaatttgcaagggatagttatgaaaatattctttacagtttaattactttttataaaagatttcataaattaccaaataaaattacaattattggatttggttttaaacgtgaaagatttttatcatcacatttagttacattaggttattattcaatacctaataaggaagatgataatattacattaaagaaattatctgatactaatcatgttaaatatattgaatcaggtcctttcctaccagaggataattcaatgtcaattgatgaatatgcaatttatgagaaaaaattttgggatgatttatataaaagtgaaaataataatgcattaaaattatttaaacaaaatccatttggttcaaaaggttcaaaattatatgaaaagaaattaaagagagatccatggaataaacaatcattattgaattcaatttatacaacagataatgaaattttaaataatttaattaaaattgatcaattagagataaatgatgcttggaatttatacaatagagaaattttaccacatttcccattataccaacaatagtactgtactattcatatccatcaagtaaattaattaattcttgtttcctctccttcattatattaattttttccatttcattctctaaatattcaatttcattatccaaactttcaaatttcctcttaaattcttcatcaactttagagaatgaaccatcagataattccattatcttatcattattattatcatcatcatcatcactctcttcatgatgatttaattttaatatataatcatgatatttaattaaattttccctattactaattgtaattaatgtaaaacctctatttttcaataaatcaaataaaatatcttcaaaatcataagaaattgcacttgttggttcatctaatacaacaaattttttattatgaaataaaattctagcaaaaattaatttttgtctttcaccaccacttaataaactattccaagttgttttaccttcaatattaccaggtacataactatcaattaattcaattttttcatcattaattataatttcatcaattttagaacctttaccatttggattataattaagtccaaatctatcaattaaataatctaatccaacatcttttaaaacttttataattttataatcatcatcacccctttcaatacaagttttccaatttaatggataaataatttgatctcttaaacaacctgaaacaaaatattgtttttgactaacataaaaaatatcattatttgatggtttacttaataatccattattaaataatggccataattctgaaataattctaattattgaagttttaccacaaccatttttaccataaattaataaattttcaccttgtaaaattttaaaatttaaattttttaaaattggtttattaaatggtccattaattgatggtggtataacattaatatgttcaaatcttaaacctgggaaattatattgaattgtaccattttcaaatattaaattatttttagaattattattattattattattaataaaacttctaaatcttgattttgatgcaaatgatgataaattataagttgaaccaaaacctccagttaatttagatttatttaaatcaatataaccataattaaaattagaatcatgaacttgatgtaaattaactaataaagtgaaaattctatcagttaatccacttaatcttgaaatatctttaattgaatacattaattttgaacctgcatctgccatacttaaaattaatcttttattaacagtaaatgatttaatatttgatgaagcaattgattctaatgaatttgttgaattaatttttgagaaattatttgatgaattaaataaaattggtaaacttgcaaaaaaataaccaaatgcaggccaaattgattttaatatataatcttctaaaatttgataaataaattttgtatttgtttcaaaatgtaattgattaattaaattattgaaaatttcttgaacttttaatctttcaaatccaatacctttataaaatgaaatttcttcacaattattaattaaattaagattataattataataaatactttctaagaaacttctaattttccaaagttttgaaaaatttggtgaataatttttcaatattaaacctgtaacaaaataatttaataaaataccagttatacctaaattaccaatattatccctaagatacattgcaaagaaaactaaatcaaccattggtttaccaacattagtaaataaattagttaaagattcacaaaatcttttaacatcttcagtaatatattgattaattaattgatgattaagtttataagcttcaagtggtttatttctagcattggtattattattatttgtatcattattattaacattattaaattgtaatttataataaaccaatttactatccatatataaatcatgacaatatctaaccaaattagttctaaaatttaatgaaattcttctagttaaatattgaatacctgcattagtatatgaagcaggtacagcaaataaaaaccaataaatcatatctcttaagaaatatttaatattaaaagacattaaatctttaataagctgaccatctaatttagtaactaaaagagttaaccaagttcttgcaaataaaagagtaatatgagtaattaaaagtgaagtatttttgttaaagaaattaggtataaggattaaattccaaataattgataatttttcgaaaaattgaaattttattgcatttgtatattgagagtcagtattattattattattattactataagaatttaattcatgatctttcataaattttttaaaaattaatttatcacgttcatatttatcattactttcaatattcaatttaacagttaataccctatctttataaggaacataaataattcttttattctttgtaggagtagtagtagtatttgatgatgataatactcttctttttgatttgaaattccatgttggggaattccttttaaggaaagaaggtataattgagaaattattaaattttggagataatgataataaattaaataatcttaatatttgataagaagataatgaaaatataagtaataaacttgatataaagaataaccaaacaggttttgaatttgtattaatatttaaaaatttaattaattgtaaatattttttccaaataattttatcatttcttatctgattaagtaagagaaattttaattgaataaattttgaatttagcttttttggattaattgaccacattgttaaaagaaggtagaataagtaaaagaagagaagataggatagtataataagttataattcaatgataattaaaacgggggcatataatggtgtctttaagtaaaataatgataatactattatactaattacaccgatattaccccagattttaatcatcataaataaataaaataacttgtcccctcaataaattttgtttggcatatttttcatttcatcccccgcattccccaggtggcgcattagatcttttccagtggcgcatgctttacgtaatggtatatgattatattgatatattaatattaatattgagtatgtgtgttattatgtatgaatattactttattatactacgtatatatactctagtctatcatactgtaatacactatagtattttaatacaatactcatatctaaccaaaagagaaaagaaaagaaagaaagagaaagaagaagataagttaagaaaaggatgagcctgcacagtaataaataatttcgctaataaattaattattattattattattacaattactttattattattggctagtatttgttacatactctatatactctttacaccctattactatcaatcatctatttatccactgtatcatatattataatactacaacacagcataaataaaagaactcccacacaacaccgatctcggaaaagcattccaaccaataatatccatttaattaccaatattacactatattaggtgcactgaagtcatttttttagtcattattttttaattaatcattcattcactatattatattaaggaataacagttccgtaatttatatcacctttacctattatatacctcttcttctttcttttcaattaaacatcacaatttaacaatgttatcaagtatatcacataataaatcatccttacgtttattcacaacatattcaaaatctttatatccttcattatcatcaatttattcttcatccactcccaattccaattccccttcagcttcatcttcagaaactccaaagaaatggtcaagacatgttatatcaaataaacaaccacttcaaaacttactagaaaaggaaactccatctcccatttctacccctaaaaagagaaaaagaagaactttaaaacctttaaaagctccaatcactttaactcaaaatgcaattgatcatttaaaaattttaagtaatggtccaaatccaaaattaattagaatttctgttcaaaataggggttgttcaggtttaacttatcatttagaatatgtttcaaaacctgaaaaattcgatgaaattgtaattcaaaataatataaaaattttaattgattcaaaggctctattcagtataattggtagtgaaatggattgggttgataataaattatcttcaaaattcgttttcaaaaatccaaattcaaaaggtacttgtggttgtggtgaatcttttatggtataataattataatcataataataataacatattctctttatatatacccccagtataatcttttatataatttctcttttctaataaactaattaaataatattaaatgaaaaaaaaaacttacacttacataaattatttacaaactacttgtctccctctttaaccataaccattcatttgatttcctctcaaatttaccttcatataatttccatatcttggcatgatattcattgatccattccttttcttcattacttaacatttgaacattaattaatttcttacaatatggtactgttgtagttgtaacaaattcgagccatccttccctatttgataattctctaagataaaccatattttcaattctaataccatattcttcaggtttataatatcctggttcattactaactaaatgtcccttcttaatagtattttcattacaatatgctctaaatccaattccaactcctgaactatgaactggtccaaatgaatcaacaccatgtcctgtaccatgcatataatctaatcctttattccataaaaattgtcttgcaatacaatcaacttgaaatcctgtaactcgatcatttggtataattaattttgctaatgctatatgtccctttaaaactaatgtataattctcaatttcctctatcgttggttcactaaaatgaattgtacgtgttgtatcagttgtaccatttaaaaattgtgatcctgaatcacataaataaatcttatttggattaatcattttactaccaaccattggtggtgaataatgaataattgctgcattagatccagttgatgaaattgtttcaaatgataatcctttaaaatttggtaatgtctctctaatttctaataatttcattgcaccttcatattcactaataaatgaacatttattaattaattcattttcaagccatgcaaaatatttaataattgcaaatccatcatcaatttgtgcttgaatttgtccttcaatttcaactttattcttaatttccttcatttgtttaattggtgaatcaacttgaatgaaatttttagcaattatacaattaacaattttccatgtactatcatttgtaagtaaaattttcttcttttcactatttaatcttgatgcaattttcctaatatcaaaccaaatatcatcataattctttaattcacaattaatttcctttaaatattcctttaattcaccatcaaatcttttatgattatcagtgtataatattaaatgattgatatcatcaattattaaataactataaaataatggattatattcaatatcattacctcttaaatttaataaccaagcaatttcatctaatgcatttaatataatagttgaagaattatattttttaaaataagtttcatttaatctctttaatttactttgtgttggttcaccagtgaatttatcatctaatttgaaaattggattaaattgtctaactggaatttcttcaaattgatcccaaatttgatcaactaaattatctcgttgaggaattaatttaattttataatttggattttccaataatttatcattaattaatttttcaattgataaaacttgtgtataagtaattaattttggatcaataccaatattaacattattacctgaatccaatgataataatgcagcatgatcaactgcacattgttcccatgagggagtatttggagtatttaattttaataaactccaattaaaatctaattcatttgttgcttgtgtgaaatatctaccatcagttgctaaaaatgctaaaccttcaggtttttcattcatactagttaattctcttgtaataattgcaatacctgcagatcctgtaaatcctgtaataaaagatctacgttgatcaactaatgatgtatattcagattgatgtgcatcctctgatggtataatataaacacctaaatctgatttttccattaaatttctaattttctctaatcttaaacttgtattcaggtttaaatttgataaatctttacaaatttcaatactttcattagatagatcatgattagcattatcaacattattactactaatacctcttcttggtgatgtaggtaaactattattcggtgaatgaattgatgaaatcgatgatgaacgtctattattactattagttcttgcagttgatgatgaattacttgatatcattcttcttaaatacattgaagaacgtttatttcttgataataaacctggtgaacatgtacaattattacatcttgtaccataattaggatttaaatttgaaattctatgtccctgtgaagcctgtgtaatagttgttgcaccgggtgtaccattttgtgaaataagtgaaaacatagatggcttagccatattgactgggtgattacctctaacagacataccttataccaacttcccttaccaaaagaaagaacatgatgtccttaacaacaattaataaaatcatgtcctcttcaacgggtggcgaaagaggcaactttaattttaattttaatttcctcactccactgtattaaccagccttcttttaatatatcaagtcttcctaactgtcttttatttcatatcgtttgactgctattggtcattctacttatctatcccattcttctattatatgtcagatctggatcatatagtctatcttattaaagagttgtatgctccatgtcagaccagtgagactatactaaatactcagaaacaattacaaattgtacaaaaacaacctaattctaatatagtggctcatcagttattacaacatgatgaaactaatatacagttctttggagctttaacttatactgtctatattactaataatccagtaactttagaattggctaatcaaatttctgaagaaattgtagatgcatgtcgtagagatttacaattaatggttatacaaaaattattatcaaatatggctaaaatttattctaaaattttctataatcccttagattatatcttaaattcattagagaataggttgaattttgatattgatcaaaccttggttttagcattattgtcaagtaaatcaatacctgaagaattattatcatcgaaaatttcattaacaactgaacaagttaatgatataattaataatatttttaagataacaactataaatattttggataattcaattccacatttaaaaggtgatgatagattgacatatctgtggttaaattgtattgaatcttggttacctttcataaattatgcatttttcgatttccatattgtaattgatattaataaatatttatcaattgttattgatttattaattaatgatttagatgatactgcattaactatcttatgtgaaatttatgatactaatactaaattaattaatgaagaaaatagattaaaacttgatgaaatgatctttagtaattggtatcgagaatttattgaaaggaaagatattgatgatgttaaaaacttatcaaaattattcacattatatttagaattaaatcttttaccatttgctcaatatatgttaacaccaaaatatgcattaaaatttaaatttattttatcacttacaaatttatatgaaactccagtattagcagattcattttcagttagtttactggatttttggatcccattaactgaagatgttttatctcaaatggattcatattcatcaaatattgaaattgaaacatttttcatgatattagctgataattattggaaaaaatctcgtcttatagttggtgatgaatttgttgatgatgaagatgatttctttgatttaacaaatcttgaacaatttttaaattatagacgtgatgtggcagaattatttgaatctctttattcaattaataaatcagttttatttggtcatataacatctaaattaataactgcattagatactaaaactgaggatattgaaatgaattgtctgaaaaatattgaagcttcattattttgtttacattcaattgcatttattcttaatgaaaataatgtaactgaagatttttatcaaagtatggataaaattttcagttgtaatttattgaaaaggatattagaggtacgagattttaataaacttgaatatacacgtattagtaaaaaatttaaatatgtaccatttgaagaattatttcaatatcttgttaaaatgacaattaaatttttatcagagattaaatggtattatcaaactaataatggtaaaaaatatattaaagatattttaatatttttatttaatttcctgaatgttgattattatagagatgttagttcaaaggcaattttacaaataactgattcatgtagatatgaattaagtgaattattaaatgattttgaagcttcagctcatacaatgtttagtcaaaaatataatattgattcaactattagatcaagaattacaagaagttatgcaaatattttacaaactgttaaagaacctcaattacaggcacaaaaaatttcaaattttcttgatctgatgtataatgaagttcaattatcatatagtctgataaatgggaatattaataataaagaagtattagaaaatattgataattttttattatccgttatttcatgtttagttggattagctaaaggtttgaaaattcctgaagattgggaagaatattatttaaataataatagacaagatgaaatgattaataattttaattattggaataatattgataagaatgaatttaaagttcatgaaaaatgtttaaaattaattgatttattttcatttccaaatgaatatattaatgatttaaaagttaataaattactaaattccgaaattatggaggaaatttatttatttttcaaagctggattaactgaaccattatcaggaccatttgttattgattcaaatttaatactgacatatattttaaaatgttgtgaattatttcaacaaaaattaattccaaaacatattaatccaccaattattgaaattattgaattatatggtgtattaattaaaagtaatatatcaacattaacgatttccaaaatatcaggattagatattaaatcaattgatttaaaagtcccaatagttgttaatgaaatatttttaaaaccaattcatcaagtaattaaagaaaatgatattttaacagctgaatatacattatttgcagatataatttctacatatccaaaatatttaattcaagatggttcaataattgttaaaattatgtcattatcaattgaacaattttttattaattgtcaagatagatttgtcattattgcaatggcaaaattttggacaaatttaatttatttaagaaagggtaaattggaagatattcattgtattaaaaatatattaattaatgaaaaattaggtatttcacttgtttattcattaattaaaggatttttaaatacttcaagatcaattattgaattttatagtgatattttaagatcattaattaataaatttagtaaagatttgaaaaattggttaattttaacatttgatagtattaataaggaaagaattttcaatggtaaggagaaaattgatgaaaaggaaattgaaatatttattaaacaattattaataactagaggtcaaagaagtgcaaatgaaataattaagaaattttggttaaatgctacatcaatggttgattatggtatgtaaagagtttataaagaattatacatttaatttatcaattaaatcaattaatgcatcacattcagatgatggatcaacttcacttaatccaacaacttgaaaacgagctttatcaacaccttgataagaatccattctagcacgaattctaaaattaaattctttatataaaactttattagttaaataatctcttaaagaattttcaatacctgaatctttaatttctaataaagttttagcatcacaacctaataaagtttcaccttgttcattaaataaattaatccacatttgaccagtttcatcaacaacacttgcacttaaaatatatctataaagtggatttttatgattaatttcacatctttcacaacgccaagttaaatcattttgttcaataacttttttagaacaaccatcagttgaacatgatggataactaaaattatcaggttttataaatgaaactgatgctttaattgtaaaataatctggtttttcattaaaacctaatttcatttcatgagctaatttaattgaagttctctgtaatattgaatcttttgaatttaaattattatttgaattactagaaattgaatttttcaatgatttaaaattttcaattgaaccttcattatcataccaaccttttaatttataagcttcaggtaaatttggatttgagaaaattgttgcagaaggtattaatgataattgtttaccattaaattcattaactttacaacctttaattgcaatgggggtaccaggattaagattaaattctcttgcatatttattccaaagaccaacattaacttccatttgagattgatcaacaattgtaatatctcttctatcataaggtttaccagttgattttgaaataatttcctttttttcatcaatatttttcaaaatacctaaaacatcaataatttgattattttcaatagtttcaatttcatttaatttaataaaattgaattgaactttaggtatatttgaatcatcattaattaatttaataattgttgatttttcaagtataatttcatgttcatttttaagtgaattaaaagttttatttgaagctctaattgatgctttactaatataataagcattattttcttgtaataaatcataaaacatatcagcggaatcattaaatgcagttgccttaatttcacttgtttgatccataaaatgaactgaaaataatttaccttcaccttttgcatttttccaagttttcatatcacttttataactaactctaactttaattgtccattcagattgataaggagataattgatcaagtgttatagttgatggggagttaggtttagtggtggtattattattgatattaggtttttgttctaattttggtatcgtggtatcattagtattattattagtattagtattagtattagtattagtattagtattagtattagtactgttagtactactactactattattattattattaatttcattttcattacctaataaatcgacattaccaacgatatcatctaaatatttttgataacgattttcatttggatttaattttaaataattatcaactaattgataattatcattaaatttttcaccatttgaaattatttcacatttatttaaaaccaggaaaaatttaccattaactaaacttatattaaaatttgatatataaatgtaggaaaattttgcaaaattatcaattgtattttgaaattcatttggtttaaaaattgcattaatacaatatttactatcatttaacatcattctaattttagcttgaccttcagtgaaaattttagattgatgaatttgagcatagaaaggagttgttaaatcattatttgtaaagatattaagtaaagagccaggtactagtttatccattgttagtttgatataaataagagatatttaagagatatttaagagataaaataagataaatttgataagaaacacgtattaattcaaatctaagggcgttgttttaagatttaattatttcaaaatcagtgagtggtattgaatattgaaaatattgaaaaataagaaattgaaaataatttaattcacgcgtcacgtcgatcgacccttctgaaaatgaaaatgaaaataaaaatgattacgtaataaaataaaccgacgcaccgactttatcacgtgactatgcattacgtaataaagagtcacgtgatgcagtgtacatgacattatttcgaatcctaaatcataagaatataatagtgggatatttaatattcaaaatttaaaacaataaattattatctacatctaagcctccttattattattcattgatgaattgatggtttaaagggtattaactttaattaattaattaaaagaccctttcttatcttatcttcttgtaattaatttacttattacagtactctaattgaggcttatactatataattctaattctaattctaattctaatttactataatttactataatttattatatctatttctatatccatcttataatcatatcctataattaatatcacactcaaaagattatttattattcaacatgattgatgatttagaatcaaatattaatattaatcaagatattgatactaatcattataaaatttcattacatgatttacaatcattattcgatccaaaatcaattaaaaatttaatttcaattggtggtataaattcattaattaatgatttaaatacaaatattaattcaggtttaccaattgatattgatcaatttgatattaataaaagaattaatatttatggtgaaaataaattaccaattaaggaaaataaatcttttattaaattatgtttagaagctttaaatgatcaagttttgattattttatcaattagtgcaattgtttcacttattttaggtctttatcaaactttttatcaacctccagaaattggtgatgatggtaaacctttacctcaacttcaatgggttgatggatttgcaattttattagctgttattatagttgtaattgttggtgctttaactgattataaaaaacaattacaattttcaaaattaaataataaaaagcaagatagacaaataattgtttatcgttcaaataaaaaaataatgatttcaatttatgatttattagttggggatttattatatgttgaaactggtgatgttttacctgctgatgttatattaattaatggtaaatgttcttgtgatgaatcaactattacaggtgaatctaaaacaattaaaaaatcaactatttttaaagctttagattattataataatgaaattaaatcaattgattcaaataataatttaatttcaaatccacctccttaccctcaatattccacatcccaatattcttcatcatcttcattacaatttgatattggtgatgatggtgtacttgatccattccttctctcaggttctcaattattatcaggtcaaggtaaagcattagttatttgtgttggtgaaaattcagttaatggtaaaataatgaaatctcttaatgattcagataatgatgatgaagttactcctttacaaaatagattaaatattttagcaaataatatctctaaatatggatttttagcttcaattatcttatttattgtacttttatcaaaatttttaatacaaattgcaaatggtgaaatatcattaactttcactcaaaaattatctaaatttattaatataattataactgcaattacaattgttgttgtggcaatacctgaaggtttaccattagccgttactttagctttagcatttgcaacaactagaatgacagaggatgggaatttagttagagttttgaaaagttgtgaaacaatgggtggtgcaacaactatttgttctgataaaactggtactttaacaattaataaaatgacagttgttaaaggtttaataggtgatgatcaaatatttgatgatattagtaactcacatgatatatcaaattcaaatcatttattaaataaatgttcaaataatttgaaaaattatttaattaaaaatattttattaaattcaactgcttttgaaaatacttatgatccagtaactgataataataataataataataatattactaatcaccctactaattcatttaatatatttaattggtttaaatcaaataaaggtagaaatattttaccaatttcatcatcagattcatgcaacgaatcagatgatgaatcttattcaaataccccaaaggatgaatttgttggatcaaaaactgaatgtgcattattatcatttgttaaatataatttcccacaaattcatgatactgttgaaaatttacataattttagagaattaaataagaaaaatattgttaaaattataccatttgaatcatcaattaaatggtcaggtattgtttatcatgattttgaaaataatgaatataattttttcattaaaggtgcaggtgaaatcattttaaataattgtaaatcattaattaatattaatggtgaaataattccaatggataaaaaattatttgaaaaaattgataaatctagggaaaatttagcaaatcaagcattacgtgcaatttcattagctcattatacattccaaaatgatgaaatttccaaaattaattgggattcaattactgcaaatgatttaattaattatccattaattttggatggaattgttggtattcaagatccattacgtgaaggtgttaaaaatgcaattgatgaatgtcatagagcaggtgttgatgttagaatggttacaggtgataatatacttacagcaagggcaatttctaaaagttgtggaattttaaatgataaaacttttaatgatcctcaatattatatggaaggacctgaattcaggaaattatcatataatgaaaaaattaaagttgttaaaaaattacatgttttagctagatcaagtcctgaagataaaagaattttagtttcaattttaaaaaaattaggtgaagttgttgcagttacaggagatggtacaaatgatgcacctgcattaaaattagctgatgttggattttcaatgggtaaatcaggtacagaagttgctagagaggcaagtgatattgttttaatgtcagatgaatttaaattaattgttaatgcaattaaatggggtagaacagttgctgcatcaattagaaaatttgttcaatttcaattaacagttaattttacagcagtttttttaacatttttaacagctataactaataaagatgattcaagtgttttaactgctgttcaattattatgggttaatttaattatggatacattagctgcattagcattagcaactgataaattagatgatgatatattagattcaaaacctgaaggtagaaatacaaagatgatttcatttaatatgtggaaaatgataattggtatgtcaattttccaattaattataactttaacattaaattttaaaggttgttatataatttatggtaaaaatttaaatgatttaacaacattggaattaatgatggttaaatcaatgacatttaatacatttgtttggatgcaaattttcacattatttgtttcaagaattttaaatgaaccaaaatctttaacttttaattcaaatttatttgatagattatcaacttcaaatgttggatttttccatcatataacaagaaattattggtttattggaatcatttgtttaatttcaattttacaaattttaattatgaattttggtggtagagcattttcaattgtacaacaaactcctttaatgtggtttatttcattaatttgtggttattcaatgattccattaggtatattattaagaattttacctgattatttattacaaaaatatttaccatttaatttattatataatttagttagttggattgaatggattttatttggatgtggtatattttcatcaccatcagttcaatcacgtgaagaaatgagagaatttttgaatagaaatgataatggtattattgatgatgatgaattaagttttgaaataagtaaaactccaagtccaatgttagatgcttcaaattatattgaaaatcataaaatggataaattaactattaaatctaataataataataataatgaacataatcaaagaattccaacaattttaagtagttcaccatcacaggaaagtctaattgatgaacaaaataattcaaataatattaattatacaaatatttaattaattaacaatgtatacttctatgtaataataattattccttattgaataattggatatattttgatttttcaattttaagaaaatcaacaaatgatgaataaacagttcgaaaataaataattgatttaaataatggttgtaaatcaattaaattatcaataattttaagtaatttttcatttatttcaatatttgtattattatcattatcattatttttaaccatttgaatttcattatctatttgatctttaattaaattctttaaactatttatagattttttaaaatcttcaagtttaatttcattaatattggtgacatcctcattttcattatcaatattactctctacaattgattttaataaatcataagatttaagtattttctcaatatctgatttatttcccatcaattctcttaattcaatcaaatttgaattactacccttatcgttaatcatatttaatttacccttagttattttcaaatcctctaataataaaaacattgaagaatttaatgttttcaaatgatattgtaatctagtttcaatattatcaccttcatgatttttatcactttcattatatgaaataatttgatttgatgaattaattaatttttcataattttgatcaaatcttttacttaattcattaatatattcattaaaatgtgaacttaaaatcatacatttttcagaaaataatttcaatgaaatatcagaattaatttcattccttcgtattgttaaattattagtattattagtggtagcattttcagttgaattaattgaagctgaaacaagtgcatttatataatctattggatcataatcatgatcaaagaattgtgataatacctctgcctctaatggtgattctaaatcaatagtcatactgtttgttgaaaagaagtagttgcagataaaatatatttcatgttagaaatttcaaacaacgagtattttacaaatttacttattacaaagttatctttacaaacttcatgatgaacataccattgatagagatccaaccggatgcattacaagtacttcatgattatcaacactataatgttgatttaccatggactgaaaaaatatggttaagaaaaaataatcattcttattcactttcagttaataataattcattctatgataatgataataatattaagataactctacgaaatggtaatattttccaatacgatgatggtaacgataaattagacattatattcccaaaattttatccagttttcaataatttaccatcaattgaatcaaatttaactagtttaactaaaattgatgataatttaataattggtaatagtaatggtagtttaattaaattttcatatcctattgggaaatcattaattaattatgaattaagaaaatttgcacattttaatgatattttgaaaataatgacattcccaagtaataaagttattgtaactcttggattagatatgcaaattaaaatttggtcaattttagacaataaggaaataattaatgaaaaaccattacgtattttaaataaagttcatcaaagtagaataaatgatataattatgataggtaagggtagaaatttaattagttgtagtaatgatggtttaattattatttgggaagtcggtagtggtgaaagtatttggaaaggaaaaaggattaaaaacttaaatgatggttgtaaatgtttagctttattagaggttgaaaatagtaataatgttagtgatagtaataatggtaaattttttgaatgttatggtaaaattttattttgtggtcatagtagtggtactataacaatatgggatttatcaaatagattaagttatggagaatttattacaaataatgataatataggtattgaatggataattgtgaaagatttgaataatataatgtgtggattgatcaatggtgaaataattagttataaatatgatttaaaaagtaaggaaaatattgaaaattggcatatcaataccaatatcgatgataattcaataaagaattttaaatcaaaattaataaatgataataaattaattatattaattaatcaatattttatggaattagaattaattaatggtaaattaaataaattatttgtcggtattgatgaagatataaatgattttatccatattaaggaaacgaatgaattattaatcaccggtaaacatcaatcaatggcattgtatcaatagaaagtgttgagttttaattaagtaatcttaagtcgctataaataatataaaataaattgaatataaaatgagacagcttagacgatggttaacttgttaattagttttccttgattatatatctttcgatttccgatcgatctccaagtagaaaatccaataacaaattctgttcacatctctcttcaccaataggtcaactatcggcggcacagggcagttatatataatcacacgttcaggcagtctcctttccttactagcatttccccgtttttccgagctactacttagcttctagataattccacgtcaccagtataactccattgtacttgcactcatatagtaaactgtatccaattattcatacggcatttactaaaattagtaacatgaagttacactctcctcgactggaatttgccatccattcattcacgtcttgcgggatttaccatcaaccattccaagaccttccattaccttctactaggtatatctgtgttctaaactcatactcccgttactaatgccgtatcaactattatccattattcaattcaccgaccactagacattgatcaattgccacgtaagcaatatctgtcatgaacccaagatttccatgtagcgaggcatatcctcaattcatcagaataggatattgtattacctaatcttaacacaccaccaaatgcttttaaggacaggagcactaccagatagaaaagacatgaataaattgtaaacatcaaaatcaattaaattataaaacaaataaaacaaatataacaaattaaataaaattatgcgatacactcgcgtttatataacaaaattttcatggcaattcaaatttggtagttccattttcatatatcataaatgtccttctataagtcatacatggtcaatgtcaagactatcataaagcacaatatcaattctaaacccattgctcttaaactaacttggtcataacaaaataccaatgttcagtgtatctgtgaagaaccttctagctaatcacgacactagccatcaccgggctaaacacagttaaatgtgagtaacatttggaggattcaccaccatcatcctaggtaagatactgttcattacttcagcagtgacaggctttgtcaagatatcagctatcatatccttagtacctatatacttatactgtatatgttcattttccataatatctctagcacgggccaccctaatacccatatgcttagatttggtgcttgtctttcccttttgtgccaggtataatgcagcagtattatctaccataacaagtaatggtctaatacgacggaattcttccatttttaggtcatccttatcttcattaattctgccatatcctgaaccataaaattcatttctcctagaatattcaggacctaatattcctaggaatgtcaaaacttcacggtagtgtgtcaatccatttccactctctaccatttccgccacctcggcatccgttgatgaagttgccatgaatttagccactctggtaaaccatgcaacaggacctccattcatcataaaaactgcagataaagtcgatttacgagatactgggtctcccgcatgatcagcgtcggaataggtgatcagtctatccatatcctgactcaaatcagactggtatctagtataccttatcatgtacttacgagtctgatacaagtaccttacaactcttaacaattcccttttcaacttagggtgtggacaaagacaatatctggataaataattagctgcataagtaatatcaggtctcacggtcaatgcaatgtattgcaatgcacctaccacttcacggaagaaatgaatctctttagctaattcttcaccggacaattccattggttcttcttcatcaaggttaaagtgaaaacctggagtcattggagtagaaatatgacgttgtgaatcaaactcttctttcatgtccaagttctttacaagattagtgatataatcctcgagacttaactcaatcgagagtaatgtaccacttctcttatccctgttttccctgacatggataccaagaatgtccttaaatccctgactattaactaaagtcatcttcaaattaaacttcttatccagcttaaacaagaaattatcaacctcattttttgatgcccctgaaataatcatatcgtcgacaaagaagccaacaataatagatatcttggatttattcttcttctgtggtttgactagaacacaaggaatttctcccctctcttcaaaaccaacagatttcaaatatttaaccaaagtgttataccaaagatatcctgattgtttcagtccatatatagccttttcaactttatgcaccaccttttccccatggttgagcttgtattccttctcttccatgtgtttaggcaattgcacataaatctcatggtctatatctgcattcaaataagccgttgatatatctatcatctcaatatgtctattgctttgtactgcctctgcgagaatcaatctcagcaagtcataaggtaacgtcggactgtaagtatcatcataggtagacttatcctgcttatccccacgtagaactattctcaccttcttcttagtttctccccccaattctttaggtctcttctcagtgcaaatagtttgcatgttgacagttctctgcagaatatgagggtcactagtaataatggccttaggattccaagtaccacgttctttgtgagcttcaacttcagttctatgggcttctctccatgctggtccttcaactggatcatgacaaacaacttggtatatgattcgattagggcccgggtcatcccttggtaacttgctgatattggcaacgatcttaataccgttgacggacctcattgagaacctactacgaagaagtcttccttcaggtagctttatggtttcatgcgggttgcccgtattcagcaaagttctatcgacttcatattccacaagattgttttcattcaactcaagcgccttgtgtatatcatcctccctcatggagcgttcgaacgtctctttgcgcttcaagtcttcggtggttatctcttccactgcaatgtcatctatacggtcatgactcctagaatcttcattgccaagtgatgtcacgttgtctactcgatcatcaagttcagtgatgctggacatttctttggatatacttccatcaatgttgacctgatccataggctcttccccagcatcctctttttcatcgaccattccatcttgagtaacttcattagtatcttttccaagattgttagtatcttcatcctgactcttaactgattctgggatgtcaactttatcttcttgcaccacctgcttcatagcatctgtggtttggccaatatcaacattatcaatcttggaatcaacttgattcatcaattcaggagcctttggtattgtatcttcatcagctttgctgacgtcaacattaaccctatctccccccatattcaatggaatgtcagcacctctaacctgaacttcttgtggtaccatatgatctttcgaatccaacatgcccctatcactgtccctgggtgtttcattcttaagggtactcttattcacttcatatacaaaattcttaggtaacacaggataatcaatatccatctcttctgattcctttcctggaattgccttgccatacttgtcaatgaggtccacttcaagattcaacgacttacccaatttcatcccgaaattttctaatggaatatccttgaatactttgactggtgtactatatttaacatttcttgtgtccttgatagtaggataataaagaccgtctttgtatttctcaaaaaccaagactttatcaccacctagaacaggagatttatctgaacatggatactctgaaggacctaggtagaaacagtgatgagcacgcatttctaaacctgaaaccttctttgaagcatccaaccagataccatatctaccaaaactcttgaacacatgatgtataaattctttcctaccagtaccagggtaacaatgttccattataatctgttccggggatttatcctttcctttaggtatgatcttgtttcttatcattgaagtgtactccatgacctgcggccaaaatctattatcaatacccgattcaagtagattcgtcctcatatcatctctcaaggttctattgaatctttctgcaatgccattctccatagatgcgtaaccattggtagttatatgagtaataccattactagcatagtagtctttcatactgttgcttttatactcatttcccatgtctgtatggaagtaagagatatcagccttaaatttattcttaatataggcacaatatttgcgaaaagcggattcaacttctgtcttatcatttaaataaaaacaaatgttaaacttactataatcacatataaaggtaactatataacggaacgctgaacccttaacacttccatcttttgtactcttgaaactcagaacaagtagatcactatgaaccaaataaaatggagtttcaaccacgtacttctctctactaccacggtaatgcctacatctagatgccttggctattgcacaatagacacaggtatccttgctgttaagaaatctttcatctttatcaactttcactgtgccattgtctatactactcttcacggtccctagctcagcatgtcctagtgcctcgtgtataccagaaacaccacatccatactgatacttcaaaatgaaatattttggaatcattggtaatccttcaacacgatacaacctagcgttgccatcttgccagaccaaatttggtttaccaccaatagatctataatcaacattatatctaatcaaatccctctcactgatatatgtaccactgatattaggacaatacaacattggaatagaaacaaccttcttcttatcaccatccattaaacctaaagtaatataaccaacaccttcaatattcaattgatccttggtaacagatgtaacattttgaaaatcaaccttacctaattcatcatcatctaaaatgtttttgtcccccgtaacggagacctgagcaccagtgtccaaaataatagaagtgtcaaaagattcagccgtgatgcctggcaacttctaaatcactatcatgaatttttccatgtctctcagccatcattaaatcaagaattgctttagcttcggtatcatttaaaattgcattaacctgtttacgtttcttatctgcatttaccaccggacatttacctagattatgagtatcactaccacatttccagcatccttcagcaaatttctcaggacaatcgtaaacagaatggtttcttccacatataacacaatgtttaggaactctgcttctacctttctttgacttaattcttttattgaccttgtgattgttaccagtgccacgtttcttattaccaacattattgttaatattatcaacatgattattatttgataaatcatcattggatctaataccagcaacaacttgtttatttttggtaatttcctttaacacagcttctttatttctgataccagcaaaagatctaaattctttatgaactttatcaattaagaccggaatatcattattttctgcatgaaccataccttcaataacctttgaaatttccttacaatcataatcatcccaaaaattgagtaaaatatgagcaactaaagtatcattatctggattgtatcttgataatctcatacaaagtgacaattcttcccattcattgagagcttgtaatctatctttggacaaatcaattctaaattgtttttgcttggcaatacatgtttgtaaatcaacacataaatcacaacctgataaaatatcatacaacatagtttgagcatttgaagaaacatttttaccaaaatctcccatcttaacagttctggaaagtaaattcttaatgactttttcttgagttgaaggtaaagtcatctccataccatcaattttagcattaaccatcctgttgaaaatatcaataaaaccaattctagccaaattagtgttaatatcgaaccaccacttattgaaatcttccttggtgttcaaaatttcaaatgtttgattagttttaagaaaatttttataaaccttatcaaccttggatgtagttggttctgcccaagtatcaccagcatcttccataataacatcaccatctttatcttttcttggctttctagttcttttcttctttggaatttcattgataatctcaactactgatttcttatcattagattgattagtttgattgttatcatcaatgacaattggattgtttgcattagatgcttgattggaatcgttagtttttgctttaccatcaattgttgctttttcatcagtttttgctttatcattggttgaatttgcatcagtatttgtagttgaatcagttgaattaatttcattagttgaattagtgttcttgttttcattaatatcagttgaattgttaacttcagcgacttgattgttgacatcatttgatgagccttcaatttgatcgttgttgttgttgttattgttgttattctctgagtgagtaagtaccatgttgagttttaattaagtaatcttaagtcgctataaataatataaaataaattgaatataaaatgagacagcttagacgatggttaacttgttaattagttttccttgattatatatctttcgatttccgatcgatctccaagtagaaaatccaataacaaattctgttcacatctctcttcaccaataggtcaactatcggcggcacagggcagttatatataatcacacgttcaggcagtctcctttccttactagcatttccccgtttttccgagctactacttagcttctagataattccacgtcaccagtataactccattgtacttgcactcatatagtaaactgtatccaattattcatacggcatttactaaaattagtaacatgaagttacactctcctcgactggaatttgccatccattcattcacgtcttgcgggatttaccatcaaccattccaagaccttccattaccttctactaggtatatctgtgttctaaactcatactcccgttactaatgccgtatcaactattatccattattcaattcaccgaccactagacattgatcaattgccacgtaagcaatatctgtcatgaacccaagatttccatgtagcgaggcatatcctcaattcatcagaataggatattgtattacctaatcttaacagtatggtattctgattaagatcccattagacgcgtcgctaaagtaattgtttatcctatatgcacattaagcaaccattattttattattacatttattattattattactattatttacacattattttatacttattttatacttattaattatcaagaattattattacaaattaatcactaccttgtttagacaagtaaatattaaaactataatttatacagaatcacgtcttgtcgaaaatcaaggtattccggaaattataaaaaaatattttttataagtaatttgaaatattaaattcaagaacaaatccaaattaaacttatcgtccaaataaaaaaaaaaaaaaaaaaaccttatccaaactattatattattaacaaaaacacaaaaaaaacataaaagaacaaaaaaaaaaaaaacttatattacagtaaaatgtcaaacattaaagaccttgatgaactgtttgcaaaactgcaacaaagtcaacaatcacaaataaatagtgcggttgagaaggctatgcttctaatgaactcaaaaatggaagctcaaagaaaagaattattcggcaatgaacagcaactcttttcaaatgaacagcaaatcattgaggattcaaagaaactgttagagaaggagataaaaatagaaaaagaagaagagcaattgcttaaaaacgaagaacaattgcttaaaaatgaagaaatattgttcaagaaggaggaagctattgaaaaaaccttaaatcaaatagttgaagacgaaaagaagttgttacaaaaggaagaagcattagaacagaaagaaaaagagttggaagaagaacagaaagcgattgaaactgctgctcaagatggtttcgatagagtatatggttttgaagatgatatggacagaagaattaaggccttagaagaagcagggtcaaatccaggaaccaggatcgacacatctcagttcgagtactatttagctgagatggacaagaagttaaaagcagcagaaacaaccccaggtgttagaattgatgaatccagatttcaatattatcttgcagaaatggataagaagcttcaaatggctaacagtaggaattttactagtgttaacagtgtcgaagaacctatcgatgtgttaagtgatgttttgaagaatatccaaaaatatatgtttgaagagatttggttacagaaccgtattgtgaaagaaattttctaccaggagggcagattagatgaagcgaagatcgcaagtgaattgattcgtgaggctttaccaaaaaggccaaccgaccaacaaattgtaactgctaccaaaaagtttcaacaattgctagcgttgaaaggtgttccattcacaaaatggtgtaatttctacaaaaccactattttaagaaattacccagaatcagaaactggtgaataccaagattacattcaattgctttgttatacattctctagatttaattttgacaaatacgacgccatgaaggagacagaactggacacatttccagaaacatatccaaatgatggttctattagaaacttctacatggattgggttaatttgagtgtatcatactcttttatcaaaggtggagaaagacgtgttaagaaccacttgagaaaatatttatatgagcatagacatggtgagcatgccgacgaactggcaaaaattgacaaaataccagaattgagaagatttatctatactagattaggtatggaacgcattccagattctttttcatcaatgaaagtgaatgctttagcaacaactccttacaatcaaaagaagtatcctaagagatcaaacgatgttaatcctttctggtgcgaagagtgtcattgcaagaactgcaaggaaagaaaacgtttgggtattcccaatcgttttaagaagaatcaacatttctgccaaaattgtaattgcagaaactgttccaaaaactttgcaacctacaagaagcatggtaagaagaatggtaacatgggtcgtaagaacattaatgcaattgatttggtgcatgatggaggcaattttgattgcgacgttaatgatgatagtgaaaaattggtttcaaacattcaacaaagattaggaatcaacgaaagtgatgttagtgatgatcagtattcagaaggtgaagaaaatgatgatgatgagaatatcgataacattgtttcattattcgaattagatgtttaccatttaggaaataatagaactcagaatgaagaaagaaaagttttattagatagtggtgcagttgttgattttgtttataaagattttttggacaacttacctgagtgggtaaaatttatcaagaaggttaagttatcaaagttttataaagttaaagcagctctaggagatgaagaagtttgttcagaaatggtttatttagatgttaattttgatgaatttgttttacatgcaaaatgtttattattacctgccaacggtactccaaaattaattattggtaggggttcattaggttattataaatttagagttgatgagaaccatagttatttaacttttggaacagaagaaattcagacatcgaattttgattttattagttgtggtgacgagaatattagcttaactgagttaggaacaacaccatacttggaagatattatgttaaaatttccaaaattatttaaagatactattaagaaaagtccatcacacggttttacttataaggttcaattagaaaactttgattatcagaaacctaaaccgttttatgctaattccatccaagcaaaacatgtgctaaatttcatcaaagaaggtaaagataacaatattctatcagatattgatgatgatggttcagttgctttagcaccagtttttcctatcatccaacatgataaggttagagtggtcacagattttagacaaattaataaatctttaaagtttagaactgaggcgattcctccaattcaattattaatccagaatttgaatggttactctcatttcacttcattagacttgaagagtgcctactttaatgttcctttagatgaaaatggtgctagaattggtattaccacccaatttggtaattttgaatacaaaaggttgcctttcggtttagctagtgctccagcagtttttacaaggtttatgcagtttgttctcaaagacattcagtatgactcgaaactacattatgttggttgttatcttgatgatattataattgcatcagttggtaaggattcacatttggatttggttgataaaattttaacacaattagacaaatgcggattaacattaacagctaaaaaggttaaattggctgaagattcaattgaatttttaggatatttaatcaaagatggtaagagatttccaactgatgagaaggttatgaccattaggaactggaaattacctacaacaatgaaagactggtataagttcattggtttcgtgaattttttaagtgcattcattccagattgtgctttattattgaaaccattgtatgaacatcattcttgtttaaagtcaaaaactatttcaactgtggaggaaggtgtattatatagaaattttgcccttattaaagaggccttaattaattcaactggattacaattatttaacccaaatgaaactctgtttatttacactgatgctagtgatctgggtgctggtggtatttttctgcaaaaatgggataaggatccaaagaagttaattccaattgctttttattctaagtctttcacggtcacacaacagaaatattcaacattagaacgagaactcttaggtattattatggcactgacacacaattacctattactttcaactgatatcgttgtttttactgatcacaaggctttagctacaatcaatcaagtgaattgtgctttgaacaataggattttgaaatttttagagattttatccacatatcccttaacaattaaatatattccaggaaatacgaattatgctgactttgtaagtcgtttttcaattactgaacagccattacttgatattgatcatattcaatgttgtgcagttcgttttccaaatgacgaaatggaggaggacaagattatttttcaatcaaaacaagttcgaaatttcggtggtctatcagatgaaaaattggagatgttaaccgagttaattgaaaatcctgatgtcgagggaatggaagaagaaaattctgatcgtgagaaaatttttcatgagttaaaaccacttgtttctttatttgttgttaaggatgatgttttatattttattcatcaaaatttgttgcttaaggtgatcaaggccggtgaatgcattcaactattcgaagaatggcatagaaaacatcatggaactccaaatttgttaatggatttgatggtattagaaaggatttttcatccacgttgtcaattaattgcttcagatgtcgtgaagaattgtgatcattgtgatttgtttactaggtttcaagaattacctgctgttatgcaagaagtgaagactccaaattttggggaactttggcatattgacttcgtaggtcctacgaaatcggtcacatattcaaaaacaaaaacaaattgtaaatacatgttagttgctgttgaatatgttagtggttattgtattgcaactcctgaagaaagtcaagatgccgatacagttattagatttttaaaggatctgtttgtttattttccagtacctcaaacaattgtctcggataacggtggtccatttgttagttattatactcaagaagtagcaaagaaatttgatattaaatggcgtttttctagtgtttattatccacaagctaattcaaaggttgaaagagtcaatggattattaaaaaggttacttaaatctcaaactattaccatgaagaaatggccagatgttctgatgtatgctttaaactgttacaataattcaactacaatttttgatgtttcacctgctgaactggttttcggttatcaaaagtttttcaaagatagttcattagatatcgttttagatataaattctctcttagaggaattttctttgaaggatgatatcattggttatgatgcttatgttctaagattagaaggtcaaaagaaactatctgcattaagagaaagaactggtaataaaaagttcaaggctagaaagatgttgaagttattagaagatccaaagaacaatcataatggttatagtgttggcgaatttgtttacttaaagaagtcaatgaagaaaactaaaactgacccatcttacgaaggtccgtttgtagttgctgaagttttagataaaaatgcctataaattatatggacatgatggtaaagttatgaagaacactcataatcttattcatttaagaccagcttttcaacattatggatctcccttaagatcaattgctgatttttcaactaaacttggtgatcaagaaagacaaattttcaaggaaacttttaacacggttgaatagaagggggtatacaattttttcggggaggtaagtattatggtattctgattaagatcccattagacgcgtcgctaaagtaattgtttatcctatatgcacattaagcaaccattattttattattacatttattattattattactattatttacacattattttatacttattttatacttattaattatcaagaattattattacaaattaatcactaccttgtttagacaagtaaatattaaaactataatttatacagaatcacgtcttgtcgaaaatcaaggtattccggaaattataacagaaagtatttaaagtttaatacagccgtttatgtgggggataaggtttttatttatattttaaattgtacaaagtttttatattatatattatattgtatacatgttatagatctaattattagtgttaatagcaggtaatgataaatcagtaattgaaggtaaaacttgtttattaattgaatcattactgtcttctccatcatcttcttgttcatgatcttcctctaatttaacgccaggactttcaagtttaattctattatttgtttctaatttaacattaatagtttcactattattttcatcatgatgttcatcatggttttcgttttcactattattttcactattattttcattttcatgttcatttttaataattattttatcatctttattttgatcataattataattattaaaatcaaatggtgtatttggtctactattatttaattgattatttgaataatttgatgatgataaattaggtgtatttaattgtgatgattcagtattagagttattataataaggatttgataaattaccattagtattaacattactattattatttgatggagttcttaattgttgaatttgttgagtaaatttttgataatttgttaaattcatatcagcaaataaatgattttgaattgttggattattaaattgttgttgaaattcaatattatttgttgatactgatgttgttgatgatgatattgattgatcatctaatttattaatttgaatttgtggtggtaataattgattattattaatattaatattattattattaatattattttgttgtaattttttttgttgttttaataattgcttttgttgtaattgttgttgttgtcgttgcttttgttgttgttgtttcatttgaattaattgttgttgataatgtttttctaatcttttctgttctttaattgctctacgttgagctgccttttcagccatttgagcttttaaattttgtttataaatacaataatcacatttttttttactatttctctttggagtatatttataaccaggatatttctctgcatgaaatcttttctcttcttcagctaatttattccaatattctctctcatttggtggtaatgctttccatctattacctaattctcttgaaacatcaggatttgttttaatttcaccttcttcaattaatgcttgatgatgtttttgtctaaataagataaaagcatttcttggtcttggaattcttgatgcatcattttgtttacaagtacatttttcaggaattttagtaattatttcatttgattgtaaattaatttgattttgtatttgatttggaatttgattttgtacttgaatttgaatttgatttgaaattggattaatttgttgttgttgttgttgttgttgttgtgataatatataattataatgatgatgttgattatgaatattatcatttaataaattttgttgttgaatttgatgttgattattaaattgaatttgatgttgattagtaaattgaatttgatgatgatcttgttgttgaatttgaggggttggataaaattgttgatttaaacgattttgttgttgttgatgaatgttgttgttattattaacaatattaatattagtattattatttgaaattggagtattagttgtattattaccactgttatttgaattattactattattattattattattattattttgataattattttgataagtttgataattttgataataatttgatattaagggagattgtctatgttttaaataatcatttgaatccatattatctaattgataaggagtatttgaattaattgaaaattgtgaaggagaatttgaaccttgaatatgttgatgttgatgttgatattgaatatgttgattatgattatgattatgattatgattatgattattaattaattgatcattatttgattttaaatgattaagtgttggataaacataaggatttgtatttgatgtatttgatgatgataattgttgaggattattagattgagaagataaattacgttgaggataatcattaatagattttaaaacatttgattctgacattaaaggattattagcagcaggataatataatggtgtatttgatgaagtattgatattattattgatactattattttctaaatcaatatcagattttaatttattttgaatattaattgataaaggagattgaattggagatattaattttgataaaggaggtaatgaaggttttaaatcttgttcattaatcatcataatataataatgataagagtgttaataagatgaagatatgaagatattaaatgaagattagattagataatatacgatagaaatagaataagaaaataagaaaataaatataataatacataatacaataaggtaaatacaataaaaaggatagaacaaagggaaggtaaaaagtagagaaaaggaaacaggaatacggtaaataactgatgaaaaatttcaacggtttgttgaaagtaaaattttgtcgaaataaaaaaaagaaattaaaattgaaattaaaacggggattaaatttccgcttattaatatactagtactattactagtactagtactagtatactagtaccaaagctaagactattagtctctattagtctctattctcgtttctttttatgcagtctaattattaaaaatattaaatagtcccatcgtccctttcttgtattattattatattatactatccaataagattccggtaatcgaccaacgcgctagtaatcttattgggaaaaccgtttgtttcccaattaggccattatgtaaacaatacggctgtttatttatttatttatttatttatttatttttcatttatttttcatttgctattttcatttgctattttcattttcattttcattttgtagatctttcttggaagttcatggttgttgtttttgttgtctcttgttttcttttcttgctttcgcctttcttcaactgtatctttttttagatctttcctaatctcttgtattattatcgtgttttcattattttatctctctctttcacttcatttcatttactatcgtttcaactcttatcaaactaatagataaaactcatacttatcaagaaacaaaaaaaagttctactttttcacatatcaaaacaaatacaaatacaaaaaaaaacaaaaaaaatatacattcacatataatctaattaaacttagcttaaatcaataaatctcaccttagtcattcctttaaaccaatataaaacaacttttattgattctatactactataaattacttatatctatttaatattttcattcgttatctaattttactatcaaaaaatgttattcaaaaatttattattaacaactctattatcaactttaattaccgctgaagaaacaacaacttctcaaattactgttactatcactcaaactgttttaactcctcaacaatctgctcaaagaaaagccgctgatgatgcttcatctttatcatctgcttctgctgcttctatcgcatctgttgaatcagtatcatcagaagcttctgcagcttcagttgcatcagcttcttctgttgcttcagttcaatctgctgcttctgccgcttctgttgcttcattagcttcaattgaatcaatggaatctgcttcttctgcttcttcagcttcagttgcttcagttgcttcagttgaagctcaaatttcttcaatttcatctgcttcagttgcttcagttgatgcttatcaaaaatatatttcttcagtatctgaagcttcaattgaatcaatccaatcagttcaatcaattcaatcaattcaatcaattcaatcaattcaatctgttcaatcttataattcagttttatcagtttcatcagttgaatctgctttattagcatctgaatcttcaatttcttcaatttctgctgcttctgtatcatcttataatgcttatagaaaatatgtttcagctgcatctatttcttcttataatgcttatttagcatcattatcaaaagaatcagttgcttcagcttcatcagtttcagtttataatcaatcaaaaattagagcttctcaaatttctgcctctttagcaagtaaatcaaatgcttcattaattgcttataaggaacatttatcacaattatcagttcattcagttattgaagcttcattatctgctaaatctttatatgataaaactcatataactaaaactaaaactttatcaaaagctgatggcttagttgctatcgcttcagaaacttcaactttgaaaacaatttcttcttcaaaatcaaattctgcaatttcttcaatttcttcaaattctcatgcaggtggtaattccttgactcctttaactgggtcattgtttggtattgcttcattcattattgcaatgttatgttagattggcaggaaaaaaaaaacaaactacttttgatatctttcattcatttattaaattatctttcaataaagatattttctttttttttaactatatgtcgttcattttccatcaaaaattttatttgtatcattattattttttattgtatacataacaatattttttctttcaataattatatattttacatcatgtcaaagcatatttaatttctaataagcttgattgatttcttttgtttaatttaaatttaaatttttaaattttatttcttttattataaattatttatttaatttaattatacaagtaaataaaacatttcttgaacctttcattggtttaatacatctattaaatttatgttctttagaaacagttgcataaattctaatattttcatcattttcttcataacattgaatttttgttataatacccataattggaatttccattaatttttcaaaatttcttaattgttcatctaatttccaaatttttaaattaccattccatgatccacttataaataaatcagaatatggtattgcaaatatattagttattccaaatggttgtggtttaggaatttgtaatttacccttttcaatatttttttcagcacttgcattatcaatagcaatttcaggttgaattccatgacttaaccttttagtaaataatggttttttcttatttaatgaccataatgatatattaccattatctgaacctgttacaaaatgtgaatcatcaatcattgaaacacattcaatactaccttcaaaaaatatcggttcagtttcttcttcttcctctttattattattttttttactatatttatcaattgaatcaccacctctaaatgttaatcttgtctcttcagatattttccataacatagcagtacgatctctaccaccaactgtaacacatctctctaaggctaatgaagatatatctaaaattaaatcttgatgtccatataatgtctctaattgagctaattcattaatactataagtacgaatttttaaatctgcacatgcaacatataattgatcagaatttcttcgaaatgataaacttaaaacttcaccctttttatttttagtttctaaaactctaatacatgataaactattaattgaccaaattataattctaccatctttaccaccagttactaaatatttaccatcaggacttgttgcacttgtgaaaatttcatcaaaatgaccattttcagaatgttccttctttaattcataaaattccataccacctttaattgttttcaataattttggatttttcaatgaatctctaatatcccatttacttatttcaatatctttagaagttgtaaataaatatggataactaattgaaactgatgttaaacaattattatgaactcttgtaattttccttttcaatatttcaccaatttgctttgaataatatttataaacccaacctttttgttctgcaacatctttctttaatcttgattgaataatttcatcatctaaatcttttgcatcaaatccatatgaaccatcattaccttcaattcctccaccaagtgaaatttttaaatcatctaaatattttttagctaatcgacgtcttttatcagcttcactctcattctttaattcatcatcttcattatcttcatcaatatcttcaatttcatcaggattttctccaatatctgcaaatacatcactatcaacttcttcctcatctaaactttcattatcttcttcttcatcattagaatgtgctgcaactattggttcatcattttcaattctttgtcttttattattttgatttgatctaacagttgaagtttttctattatctctattctttcttttctttttagaaggatcaacaaaaaaggaatcaaccatgtttagctaggtttaatttatattatattattattgattgtatgatactttcaaaagaatatatacttcctttctttacttttactaagtgaaaaaaaagttttcatgcaatgcaatatgaaatttgaaaaataattttttttaaagtgaggtttgttaaataggcgcgtcttttaatttgaaacgatcattttgattgatggcgttgttaataacatgtacttgctctcatgacagtatgatgatggtagtttgttataatgatgatcaagtgtcaatgatgatatgagttcaaataatagaacagttttatttgaaataatgtgtgaaaattttatcaataatggaaaaacaggatttgatatcacgtgtatgattattaatttatactgtaaattatcctcaatgaatgtttttaactgacattgtatccttaatatcttagtcaccccatcaccagtctctctatccctaataccccaaagaacactcaataacactcaataacatacacacagaaacaaaaacggctcagctaaataaacattaataaaggaaataaaacaatcacttacgtaacacaaaggaaaaccaaattttctaatttaccacacagtgaggagggaaaacttgaattttaaattaatgaataatttcattttatttcgtgttttggcgtttgctttatatcgaactttcaataatatctctttttcaaacaacaagatgcaacttgacgataagattacaaatgcatatttacaggagacacccatctatttagaatcagtcgggtttacattacttacagctgcaaataaatcaattaaagttttcaatttaaaaaataatacaagagaacctgaaattattaatactttagatgaaattaaatcaattaatatccattctaataataataaacatataggtgttgtatcaggtggttttgaatgtggtattcatgatttaactggatttatatataattctaactctaattctaatgatgatactaataattcccaaattgttaaaatttggaaaagtagttctaaaataactcaagcaattttcactcatggtggtcaaagaatttgtattggtgatttaggtgcaaatatgatatttattgatatttcttcaaatttatcaaattcttcaaattttggtaaagtaatcgataaaattaaagttaatggtgaaattactggtttatcttatagttattctgttgatttattagctgttacagttgctgatggtggattatatatttattcattaagttcaaattctcctgaaagaaaggcaattgttggtaatattttagttgataaaagattagcattaactaatgaattaggtttaggtgatgatgatagtgatttctctgatttatctgatgataatgatgatgatgatggtttggatataaatgataatgattcaatgttcacagagacaactaatggtttagatagtaaaaaatcaaggaataagaaaactaatttattaaaatttgcatcatcaaaaactgtttggaattcagttggtgatattttagctataccaaataaaaattttaaaattgatttttataatgctgttaattggtcaaatagtatttattcattatttgcaggtaataatttacatcataaggataatttaactgcaatttcattttctccaaataataaatattttgcaagtataagtttagataaattattaattatttgggatttaaatactaagaaaatgattggtagaactataataccatttattggaattgatattaattggtctgatgataaaaatttatcaattagttctaataatggtaaatttttatatattgatgaatcaacatttaaacaattaattaaaccaaaaggtgttacaattgatgaagatagtttaaataataataataataataataagaggaaaaatgattcagatgatgaaggtgatgatgtattagaatcgaatgatgaagaaaatgatttagatgatgaattagatagaccaagatcacaagatttagatgggtttataattgatgatgatatgaatgattctcatagatatcctgatggtgatgattttgatagttataataagagaagaaataatgatatgatgtcagaatcaacagaattaaccgattttaataaacgtgcaagaagagaacaaaataatagtaataatagagtaggaccttcattaaatattagaacaggttggggtaaagcattaactaaaccattttcaattggttcaactccatttgatggatcagatagaagatatttaacaatttcatcaattgcatgtgtttatacagttaaaactcaaaatacttttaaaataactgttttattctttgatgaagaaaaacataaaaaatattttttcgatgatttagttggttatgatatttgttcaattaatgatcaaggagcagttttcgcaactagtggatttaggaaaaataaaggatttatagctagaattgaatataaaaatcatcaaaatggtagaagtggtgaaactcaatggattagagaaattaaattaagaccatatgaatttattacaagtgtttcagtttatggtaaatttattttcatttgtacaaataaaggatttgttaaaaaatttaatattttcggacgtttaattaatatttatatgatggattgtgttattggtataatgaataataataattatgttttcacaattattaagaaaagtattgaaagtggatattttttcaatattcaaaatttagatgatgattatattcaacaagaattaagtataccattaataactgaaaatgatattgattataatatgaatgaaataccaattaagacaatgtttttctcagaacagggtgaaccatgtattgttagaaatgatggaattttaattgttttaacaaaatggagagatattaataataaaccaatttggaaaccattattagatattcaagaaggtatttcaagatcaggtaggagtaaagaattaaaggcatggccattaggattatttaatgatagttttctatttgtaccatttagaggtagtaaaaattatccaattttcccattattaacaccaatgaatattgatatacgaattccaataaattttgttgatccaaataagcaaaaaaggaaagaaattggatctgatattgaagatgatgaagaagaagaagataatgaagaagataataatgttgaaaatcctgaagagaaatttttacgtacaattatacttgcagaaatgttaagtgattcaatttcaaataatgaaagtgataataataataataataatgaaacaattgaaaaattacaattattaagtttagaatatgataaaacattattaattcaattaaatgatgcatgttcaaatggtgattcagatgatgcatttgaaatttgtaaattaattagagatttacgtgcattaaatgcagctcaaaaaatttcagaatctaagagtatggcaggattagctagaagaattagaaatttacgtgaagctagaatggcagaggaagaagataatgaaatgtttaataaagatgatgataatgatgatgatgtctattaaaactatgtaacttttataaattattatcctaccttctaccacctctaccacctcttccacctcttcctgctctaccaccccttcctcctctactaccttgaattttctctatatcatcattagacaatactaaaccattacgagttgaacgaccaacagattgaatttttaaacctctatctctaattttattaaccttatttaatcctctaccataagttttctctgaagaaataaatgaattatcattatctaattttctaaaagtacctttcttattcttacttaatataataccattttcccttgcatttgtttcaaattgattaattctttccatttgtttcttaatcatacctttccttatattcattggtatattttccattttatttaattttttttcatcaccattaattgatgataattcatgaattcttgcatctaatgtacgtactcttgccttgccaattattggatcattaagagttttcaatgttaaatttgcacctgattgataattagccttttcacgagtttctgataaatttttaagtaaatgtgattcacttataaatctttgtaattctaaatcatctttaagatctttagctgaatttgttgaatttttattattaatttttaattcttgttctaatgcttcttgtttctttcttttcaattctattaatgaaattggtttacctgattttcttaattttttttcagttgatgtaggtttattattggatggaatagaatatttatcttcaaatttaacaactattggagccatgttcggtagtgatgatagagaattttacaaaaggaagaagatttattttttaaagctgaaaaaaaaaataaaaattaaaaataaaaataatttttcacgataataaatttcaattcacttaattcatgttgatcagtagacaatcagtagacaatcagtagacaatgactaaatacgttgggtgtattgatttacacgatggtaaagttaaacaaatagtgggtgcaacattaagtaatgaaaaaaataataagaataatcaattatcaacaaattatgtttcatcacatagtcccaaatattatgcagaattatacagagataataaaatctatggtacacatgtgattaaacttggaccaaataatgataatgcagcagatgaggcaataaaggcgtggcctaatgcattacaaatcggtggtggtattaatttagataattgtcaagaatggattgataaaggtgcagataaagttataattacaagttggttatttcctaatggagaattaagttgggatagattaaaacttataagtgataaaattggtaaggaacatttagttgttgatgttagttgtaaaaaggataaagaagaggaaaatgtttggatagttgcaatgaataaatggcaaacattaactaatactaaattaagtaaagaattatttaataaattaggtgaatattgtaatgaaatattagttcatgcagctgatgttgaaggattatgtaaaggtattgatgaggaattagttaataaattaggtgaatggtgttgtgatatgaaagatattaagattgtttatgcaggtggtgccaaaagtttagaagatttaaaattagttgataaattaagtaatggtaaagttgatttaacatatggtagttcattagatttatttggaggtaatgttaaatttactgatttagttaagtataataatgataataataataataatttataatttataaacctgcatagaaagtttttttatataattgtttaattgatttaacaattgaagttgcaaaataataaccagattgtgttgaatatcgtaataatggacgtaaataatataatacaccagctaatgcaaaactttgtacgaatggcattattatttgatcaattataattgatttgatgattattgaaattggtacatcaacaaaatcatcattttcagctgttatttcatcattaccatttcttttcccattctttgccaacagagtcagtttagcagtgaatgattcctcataacgtagatctggtatcgttatagcccccgtcattgtcattgtctataagatgtataccagctgttatacttaaggaccttcaattaagaaagacgcggcggaaattgttgaaaatttaaatttttccgctttccatgaatttagagtaaagtaaagagcttttctattaatcattgattgtttatcttaggaaggtagggtagtatagtatagtgaaggataatatgtcaaaggaacctcagattgttattaggaaagcaggtagggatgaagttgattttattttaagtgatgttgaattatcattagcaaattcattacgtagaattatgattgcagaggtaccaacattagcaattgatttagttgaaattcaaattaatacatcagttttagctgatgaatttattgctcatagattaggtttaattccattagatagtgaagatattgatgaattaaaatatacaagagattgtacatgtgaagatcattgtccaaaatgttcagttacattagaattaaaggcaaattgtgaaattgatgaaacaatgaatatttattcaagtcattttattataacaagtggtgtaggtaataatcttaaattaggtcaaccaattattagagatccaatgaggaaaggtattttaatttgtaaattaaagaaacatcaacaattacatgttaaatgtattgctaaaaagggtattgcaaaggaacatgcaaaatggtcaccatgttcagctattggatttgaatatgatccttataataaattaaaacatactgattattggtatgaggaaaatgttgaaaatgaatggcctaaaagtttaaatagtgattgggaggaacctccaattcctggtgaaaaatttaattataatgcaaaacctgataaattttatataaatttagagacaacaggtgttttaaatcctaatgaagttttcaataaaggttgtaatgaattacaacaaaaattagctaatgttatatttgaattaaagaaattagatcaacaatcaaatactgatgataatagtaatattaatggtatggatagtaatatacataataatccacataatatcaatcaaggtgatgattattctaataatatgggtagacgtacacaatatggtggagggggaactcaatatggaggaggagaaacacaatatggaggaggatacactcaatacggaggcactactcaatacgacgacagaaacagaccaaacagatggtagtataagacattgttgttgttactgtatgtattgtataattgtatgtagttaatagtatattattatgtaagcgtagagaaaattagtattattatgaattatggagagttttatcttaagaatggcaaattgtaggttgtttctttagacaacaaggtatataatggacgctattataggtaagactatatcaattttatcatatgcacaagttagatatgttggtattattaaaagttttgatggtgaaaaaaaattaattacaatttctaatgtacgtatatttggtacagaggatagaattaaagatagtaataaatggattttaccaacaagtggtattataccattaatggaattacatggtgattcagttagtatgttgaaaataattgatgaagatgttaatactttagtaccaactttattacctgaaatgattaatcctgtaccagaagaagtaaaggaagaagtaaaggaagaagtaaaggaagaagtgattaatgataatacagataagaagccaattgatggtaaaaatattaagaaagaggatacagattttgattttacaagtaataatgaaaaatttgaattaaataaagatgatgaattaaatgaatttaaatattcatataataaaaaatcatcatttttcgatgatttatcatcaagtgttaatgaatcaaataatgaacgtatgacatggatgcaagaaaaatctttaaatgaagatacatttggtgaatcaagtgttaataattttagaaatagtagaggtagaggtagaggaaatagaggtaggggaagaggtagaggtagaggaaatagaggtagaggtggtagaggtaatagaggtgattacaataataataataataataataataatagttataacaaccaacctgaatggatgttttaagtaaagtattaatatagataatgttttatagtattacgaaaaattatatggaaatttcaattattcttgtttcatgttttattttatattttgttttatataatttcttttctttctttggatacactcctttaaacaataccatgaataaagacattaatgaaatacataaagaatttgaaaaattacaacttgaagatcgatataattatgcaactatcccaaaggatacaaatcatacaccatataatagatatagagatattttaccatatattcatagtcaatataaacttaataatggaagatatattaatgcaaatataattaaacttggtaataaaagatatattgcaacacagggaccattaaagaatacaattaatagattttgggaaatgattttccaagaattaattgaaaatgaagaagttgttatagttatgttaacagaattagaggaaatgggtagagagaaatgttatgattatattagtaattttgatgaaacaattgaaaaatattgttcaaaatatggacttttattaagaaattttgaggaagaagattgggataatggagttgaagttcgtagagcttatatgtctaaaaatggatatgaatttactattgaacattattgggttagagaatggccagattttggaataccaagtgataaagatggtaatttagaagttattaaggatagaaattggggtaaaagtgtaattgttcattgttctgcaggagttggtagatcaggtacatttattgcaagtgattatctttataaattttataaaccaaaggaaggtgaaaagagtaaatgtgataaaatatatgatattgtttcagaaatgaggaaatcaagggttatgatggttcaaaaatttgaacaatatgaatatttacataaacttttctgcaataaagaagagtgtaagtaattaaagaaactaaatatattatacaattattgtttaattaattgaattttacgacgtctagcgttaataaaccaatttgataattgttgagctgtaagaccagtcttactcattaaatttaatttctctttactatttggataaggatgatcaatattttcatgtaaccaatttaataaaattgttgttgattctttcggtagattagctctttttttcttaccatttttagatgttattgatgatatacttgatctagtggaagtggaagtagttataggtttttgaattattttatcatcatttggtgaaggtgtatcaccaaatgaatgttgagcaacagaagttaaagtttctaatgaagttgaaggagtatttattattaaactagttgatgtattgatattgtttgtagtataaaagaaagaatttgatcttgaatgaggtgaatagttatagttattaatagtattattattattattattaatattatttgtattataattataattataaggagaatgaagagaatctattgaagacattgaatcagaacgaggaggtctcagtaatggaggtctattaatattattaagtaaattattattattattaatattattaataatattataatttgaaggagttggtgaggaagtgggagggggacttattgaaagcagtgcagaatttgataaaagagttgctatagagggtaatttaccaggatgatctctcgacgttgacatggttgtacaaagaaaggataataaaataacaaaatatcataaaataacataaaatcatcaacagataacgttaactgtcaaatgggaacctgtcaaggttataaatcaataatgaatgaaaatttactaataaaaatttaaaaaacttctctcaaatgccacactgtgagaaattatagataagcattattatagatagtgatagtatttaattgaaaaatttattgagaaacactgtgataaggatattggccaatgaaatgagagagattagatagtagatagtagatttatatggagattatggagataatgaaaagatggggggatatatccacagtcccgtcggtgcttatgtaatatttgaatattgtgttacgtaatatttatatttatacatgctacagttcagttgttagagtttcagcctgtgcatcaactagtaacaacggtggtaatcctctacattctctagctatcccactaacccattcaacacatctcctttcatctaaacttatccccatttcaactctatttaatcctgtaataactaatctactcttatttgagtgtttcctaattacatcacttgcaatttcttcctgtgttacaacaactgccttagcatctcccattcttaaaatttctaataatttctctaattcataatgtcgatgtttaattatttcatcactattactacaaactgtaacaataactcgaacttgatgttctttccatcttggaactgtatgtaaaattgctcccatttgtaaaatcatcgtccctgtatcaattccaatatccatattactcttactattgatactactattactactagtattaatacttttcttattattctccccaccaatcatctccattgggtataaatcaataacccctacctcccccatatcaggtatctccatacgtgggaaacctttggcaattgtaacacttgatccaagcataattaaatcttcaatactaccaacccattcacaaatacttatattcctcctctttttcttcattgaattttccatttcttcaaaattcccatttttcaatatattcatctcttcttcactcatttgtctacaatatccttcctgtaaactttcaatatcttcatcattaataaaccctctatatttaccttcatatttattaaaatcataaaatcccataatactaatattaggtttcatacctcctaatccactaccaaggaaaatatttataataccattcctataattatcacttatactagtttgataaaatcctttaactttactaatctctaatatcttcatccatttattcttactaattgtgaaaattccaatatcttcaattaatttattacttaaaaatacatgtcctaaaacatataatccaccttttttcaaattattacaaaatctaattaatgtccatgatgtaattggatcatcaactaataataatatttgtggtctccaatatttaacattatcttgtcttaattttaataaatatttcctaacttgatgataaattaatgattgtgaaacatcaccccataattttggtggtgaaataaaatgaattaatataattaatatacctaataatccaataattatacctgcactaataccatcaacaataaacatcgcaattatacttataatactacccattaatgcactattagttgaaaaatatttaaaacttggcctaaaatttggtgctgatccaatccttaataatgcacatgataaatttgtaacaataaatgtcattaaaaatgccattgtaataaatgttgcaattttatttaaatctgcaaataaaaataattgacaaattaaccatgttataattataccctcttttggatcatcagttttagaatctcctctaccaaatatacttaatcctggtaatatttcatcccttgcaatagcttgtaataatttagcagatccaacaataccaacaataattgaaaaaattgatgtacttaattcacctaatactataattattggtgatatattaataatttgtaaaatttcagtatctaaatataataaatctcttggtatacaacatcccattgttataattacaacaaaataacatataaatgtaatcattaatccatttaatgtacccttaggtatactcttggaaggattttgtaaatcacctgacattgaagctcctgcaagtatacccgcagttgcagggaaaaaaataccaaacatatcattaaatgtttcaatattatcaatttcactacctgctgcacctttagtaaatcttggtaataaattatcttttaaaatatcaaatgaaaatccaatatattcaataccatattctgtcataaatggtttaactaaaattgcagaaattggtattgaaataattgaaataattaacataatacataaatatttacctgcattagaaactgcacttgatccaattaatgaaacaataacacaaataaataatattaatgtacaataactaaatctccaccaatatccatcaattaaaattggtttaataattccatcaaattcattaaaattatacattaatggttcaactaaacctgcaacattcattgaactatttaatatttgtccaatatagaaaataactccaattccaccaccaaattcaactcctaaactacggcttaacatataatatgctccacctcctttaactttaccattagttgcaattgctgaaacactcatagttgtcaataaattaattgtatatgataaaattaataaacctaaagtacctaatatacccatttgtccaataatgaaaccaaatcttaaaaaaagtaaaattgataaaacatttaaagttgtaggtaatgtaacaccatttaatgtatttagcttttgatgtaccttaggttcttcaccttcttcagtataattattattattactattattatgattattattattaaaattgttaatagaaccttcatgaatagtaaatgaactactatcacttaataatctttcaatacctggtcttattaaagattctgttgactgagtttcaattgatccatattttggtgtatatttagatgtctttaatgatgtagttatattaggattgatacattttcgagtctctcgttgtgtattccttggatttcttgagtgcatttacctcaatattataagaaagaaacagagatcaatcaatcaaccagaagaaaaccatcatgcaaccaacagatcaaacaactcatcgatcaaggctgggatagagtttcctgatgcagctacgtcttctgtgaaaaaaatatttttcaatttttactattgcttctttttacgaaaagcaagggcaaaagtatgtggaatagaggacatcaggggaattatagaggtaataaacgtggtgggtacagaaatgggcgtggaaatggtggatatgatcgtaattataatgggaattattataattattcaaatcaacatcaaattccacctcaacatcaatattcacaaaattataatcatcaaacaccaaatactaactataatagtaataacaataactaccaacagaattatcaacctaattaccaacaggggtatcaacaacgttatcaacaggggtatcagaatcaacaaagatatccgaataattatccaaatgcaggctatgaaactttgttacctgttgagccactcgttaatgaacctgtagatgaaaagaaaagacaatatgatgaacctatggttgaagaagagaaaaaatatgttgaagaaactgtaaaacctgtcaaatctaataagaaaagtcttatgaagtttaaacgacgtaaagttgaaaagaaagtaactaaagtggaggaaactaatctattcgaaaccgaagatcaacaaaccgaagaggtaaagaaacaaccattacatgaagaagtaaaggaaaaagtccaggaagatacattagaaaattctaacacattggaaaaaagtatttccgttgagcaagcagaaaacgaagtagaagcacaagacgataaaaaccttaatgaagatctcgatgaagatttagataaataccttttaacattagcagaatctgataaatcaatacatggtaatattcttaatactgaaaacataagtgatgatgacattgatgaaatttataatgctgatttacaattacttaatagtttaaataccgataaaaataagaaaattatcccaaaacatgaattaagtacacaaccaattgaaaaatcattctatattgaatcaaatttaatcaaatcattaactaaaaatgaagttaaacaattaagaaatcaagatggtattataataagaggtaaacatattcaaaaacctatattagaatggaatcaattaggtttacccaatgaaatcttccaaatattacaagctaataaatttagttcaccaactccaattcaatgtgaatcattacctaatataatgagtggtaatgatttaattggtattgctaagacaggttctggtaaaacaattgcatttctattaccattatttcgtcatttattaagtaatattaataatattactgattctaaaacatttctaggttcatcacctcgtgcaattatattaaccccaactagagaattatcaattcaaattggtaaaagtgcacaaccatttgctgataaattgggtcttaaaattgttaaatgttatggaggtattagtattagtaaacaaattaatgaacttaaaagaggttgtgatatattaattggtacacctggtagaattatcgatttattatgtacaaatagtgggagaattttgcgattaagttatgttagctttttagttatggatgaagcagatagaatgttagatttaggttttgaaccacaaattattgatattttgtcaaatttaagaaatgatagacaaagtttattattttcagctacattccctatcaaaattcaaacaattgcacgtaaaattttaaaagatccaattgaaattattattggtaataaaaataaagtaaatgaaaatataacaaatagtttccatgttgttgataaaaatgaggaaaaaatggctattttattgaaaactttaggtacttgtaatactgagagggagaagattttaatatttatggaaaaacagaaaagttgtgatgaaatggttaataaattaatttcaagaggttatgcagtaatgagtttacatgggggtaaagatcaatatgaaagagagggtattataaaagatttgcgtgatggaattattaatatattagtagcaacctcaattgcatcaagaggattggatatcaatggattaaatatggtcattaattatgatgcaccttcacatagagaagattatgttcatagagttggtagaacaggtagaggtattaatcatggtgaagcaattacatttttaattaaagatttagaggataggaaagcttatgagatttgtcaagtggttgataaacctgatagtaagattgttgaaatgagtgagaaatggatcaatagaccaagggaggagaataatgaaggtaatggtgaggggaatgtcaataataataacaataaaggatttatttatggattttcaggtcatggacttgagagattagaaagtattcgtaatgaagcacagaatgaggaaaagaataaatatttagatgatgatcaaaaaccgggtgatcttaataacagtaaacttgatgatgaattaattgattcgtcagttttaggaccagttgatgtgacaattggacaaaatggggaatacgttgcacgtttagagataaacaatcttccacagaaagttagatggaatgtcacggctcatgaaacaacttcccgtgtagaagaattagcatcagtgtctgtggtgttgaaaggtgtctataaggatccaaacagtaactccaattcaaaggatgaaccactctacatgagagtggagggtccaggcgagatagctgttcgtcgtggtgtgtcattgttacaagaaaacattcgttctaatcttcaaagactgaacgtatagctctatatactacaaatgtataatactagtgtaaaataaagataaaaataaaaataaagacaaaaatttcatcaacttaagggggctcaacactcacctgaaaatttgttgtgttgcaaattcaaatttttctattgtgttgcaatttgacactctgtaatctaataaagacttttattttaccttcttttcaatttattactaggcatcttgtttatattatcacatcgggggtaatcaatacattcattattaaaacattacaataccaatgtccctggaacatccactttcttggaatgacgttttcgaaattgttaaatcataccatttagacaaattaggtagatctcatgaagatttagaagattatagaaattttaaaaaatctcttgaagctcaaaagataggtataacaacaaatttacttataaaagtattaaaatggctgcctccggatactgatatgcatatgccagattcagagagtgtgaaattggttaaatataatgatccaaggccatttgctgatgaaagggatacatttattacattaaatgatttcccatattatatatcgaataaaactttacatatgcttgtatggattagattcccaatgttacctgatccaaattctgaaattggtgatattgatgatgatacaaagagaataattgaaaaatatgtttgtaaaacatttgttgattatgttggattatctcgtgatcaaattatttggtggaaaaattatacaaaaattcaaagtattaaagcaattcctcatgttcatgtattagtgaatttagacgatgatcatgatggtaaattggagaaaaaactacggagtttaattggaacaccaggggttttgtttgattatcatactcccgataactcaaaactataatattttgttgttaaatacatacatattactttattttccatactttattgcttttttttattccgtatatacacagatcctatactttacataattagataaacttattcaatatattcctactgatttttttattcattattaccattcattatagaaaggtgtttcttgaatggtaaatttcttgaaacatgaggtgcatataacttttcaccatataataacttacttttatcagttttagcaaactgttttgtagtaagaccgggtattttacgatgaaaatgtctcgtggtacaatgttgaaagaaatcaagtacacttttagtagtaatttccttagtaggtgctggatctaattcatgttttctatgacattcattacagattaaatgaaatttattatcatcttcaacaaaaactggaattggcatttcattacctgatgcatagacaccatgatacatagcaagatgtgaatcatatgccatacctcttaaattgaaaaatttgttatcgtaacaaaatcttttttcataatcgtgatcaacaggacaataaggacataatccttgttcagaaacccttctaccactatcatcagtcttgaatctgataacaaaaggttcataaaagttaacaagttgacctgaacatcttaatggtaattttttcaaagtttgttcaggattataacgatattcccaaccaaattccttatctctacctttaaaatgattaatattcattccatttggcatgaataagaaaacatttgtaaataaataatttgtaggttcaattccatcaatacctaaattaccagcaatatgatgagatttttcaatttcatctttgaaatgtttagtttccataatattccagaaatattctgctgtaccataagttgttaataaatgttgttcagtaacatcaaagattgaaaactttgaattatcatcagcctctgctaaacgacgtttaagagcttttggtttacctgatttgtttttacttgccttgtaaaaaacagtatattgtgctgcatttttgaatccgtgaactctttttggtggaatattaagaactggtttaaagatacgttcctctaattcctcatcggtttccttctttgaagcatcaggaacaatcttaacaagaacttttttaagttcatcgtcagtataattaacatcagaatcatcatcttcagcagactcgtaatggaaactaactcttgaattagttttcttaacctcctccttcttcacttctctaattttagaagcaccctttttcttacttcttttaatgttttttctagaacttgattcacttgaatcaataaaatttttaccggtgatcttgttgaaaaaactgtgtctattgtgtaaaaccctgttgtttctttgaatacaagcttcatcaaacttaatacgaggtggttcaatgattggttccctaagatcaatatcatgttcactatcactacttgaataaccatcagcagcgttatcataatcttgagaggtataagttcttaacattggttgaacaggattgtagaaattttgttcagcattagcaattcttgctttttgtgtagagcttcttgtcatcattttgtttgatatgaaaaagatgtgaaaagaagtaaacaaaaaggagaaagaagaagaagagaagaagaagaacatgatgaactaaatcaattattgttgattgattcctccctgttttatagaaatcataatttacaggataacctctggtacagatactggtgatgaccaaacagaatatgattgtacaataacattaccataagtggaaaattaatttttgaaaaatcatcactctcggagttgagccgcgttctgtacgttttatcatcaactccgaaaccatataaactatactgtgtacattattgtattggcacttcatgattattattgaaattaatattagattataaagatatatataggagtttaaatgtaataaataaaaaaagtataaatagtaataaataaaaaggtataaatgtgtaaaattattaaacaaacagaatatatttttttcaaaggtataataatctttttttttggtttttttttaatgttttccaatttctagagtctaaaaactatctatttctttgagctctagtttggtacgaaggaaaaaaagctggcttaaatttttccttatgtttcattaattccaattcagttaatgttgaattcagtaatctatcctcaaaatcagatggaggcgaactaccataagttgcacaactttcaggataatctttaatttcaacataatcagcaaaaggaataccttcatcataaattgattgtttaccaaaatgattttcttctgcgaaaatttcatcaaaataagcacgattctttcttgaatgataataagatgaacattcaatttcctttgcataatatttgagttcttcttcaatgattgggaaaactttgatattagtttcttttagaactacaaatccaccgacgagtaaaacatcacaatttgaagcataagctaataaaagatcttcattaagacattcccaacgtctaaactttggatggtatttccaactaaataattcaggtgcaacttctaatgtaactggacatctccaagctggatattcaccaggtgctaaacgacctctaccaatatattcatcaactagttgatttgcatatttagaaccaaaacaaaatccccaaaagccaagttcatgacttctataaattctttccttgtaacgtttatgcatttcattataattaaactcttttcttttacctgttaaatcacatttatgcataagtcttgaataatcttttggatgagttgtatcatatggaccaggaccatgataaccacgttgattttgaaaaaggaacccattactgttagagtgatcaatgaaatgttgccaataaagaagattgtataaatttttgttgaaatcgtgagcaacatgtacaccttcttgaaagtcttctctaacgacgtaacccataatttataaatttgaaactttgtttgataaataaagcaaaactaaaaagaaaaacaagaaaaacaagaagaagaagaagaagaagaagagaagaagagaaagtttaaaattacaaaactgagtgacaagctctccttaaataaccatcactaaaaagcagatcaagtaaaattaattcattctcagatcaaggtacataataaccgtgatcacagaattgcctaaaagaacctgctctgctaccagatcccgctaatacttcctaaataggccatcacacttcccaaaaaggaaacccgcgagtaaaattttttttttcatgatctattgccaagattacctaattaagaaaattttttgattcctatttacactgtagcatgccaattctaaacgttttttaaaatgtaaataggtagaacaataacatattgctaagtacacatcagtatgggatttataaatcctggtgtaacttatatctataataggaaaagaattaatgaaaaattacccattaaaaatagaattttcacgaatcataataaactgtacaataaatactatcaaaattcaaactttacacaacaattggcagaattaaacagttcatatgaatttattagagaaagaataataaagaagcaaaactctgaattggtattggattccttaatagagacattgaaaaaatatattttaatatcaactgaagtttatatgactacaggattagatgatataacaccattgagtagagaagatgcaatcaatatgttaaaagatttaactaaattaaatgcaataaaattaaaggaaaaaagttcaaaatattttaagaatggaattatacccaattttgaagcacaattcaatcgtaaatttgaaattgttaaaggaggttgtattactctcaacaactttttcgataaaagaactttcaacgagctacctaatgaaaatttctataaacaagacatgtatgaatatgaagatgaagatgattatattcaaaatattgaatataaaccgaaaatggaaccaaaaatggaatctaatatagaacctaatatggaacctagtatggaaaccttacaacaaaggttaaacaaagagcctggatttaaaattccaaaacctaaatcattaactgatttacctgacgatatattagtaaagataatttcatattcacataacattgaaagtatttcacttacttcaagttttttccatagatttattttatcacatattgaatttatttcatatcaaatgatgattgaaaaatatgtacatacatacagtttaataaacaaaaatcaaatagatgaacatgcaaatgatacaatatttacagaaattaatgatgaaattcatcattcaaactcacataatatgaaagtttcagataatagagaagagaataataatatggagaatataaaggaaattattagaaatgattttaaaagagatattaatggtaaatttcatacacaacgatatagagatcctgataatttagtcattatatcattaactgcatttgaaacaccatttatgacatatgcgatttataaatcattgggtatagatagagttttaacatcatcattatggccagattttgaagaaacatatagtaaagaacttgaaaagcttaatgaaaataatcaaccaaaaatagataaatctgtatttaaagaactttggacagaactaccgattgcattaccatttttgaatccgaggaatgcgatagatctagattatatacgaactggaatgtatgttgataaattaaggataatattagatttattagtattagaaaccaaattcactaatgaacttgaagatattttccactttattgtatcattgtgtgttaaaattagtgaagatattattgagaatgatggtaattcaataatacctgttgaaattttgaaaaattatggtattttctatatgaaacaggaaaaattagaagaagaagaagaagaagaagacgacgaagatgatgatgaaacattatggaatgaaataagttttaataatccagcattttattctattttaaagaataaatctgatatacaattggaaaatttattatgtccattattcctgaaagatcatatctgtaatgatttgaatttctgggaacaattacattatatggaagatgatgaattgattgatgagataatcaccaagtacaagatatcaccatcatcacatgtattgaactctttggtgttgtgaatatgaaatgaaatttttggaattgatatcagcaataaatccatggagttaaaaactctgataagaaattttgatggcatggcatagaaaaaaaatattttattaaaagatggaccgtgtatattaagaatcagtaatttactttataaattatactttctttatttaattataactaatctatataccatataaacaatgccatcaattaaagaaactattattatcaatgcaaatgtcaagaaagttttagaaactttccataatttcaaaaattacccatcatggtcaaaatttatgacatcaattgaaattactgaaccaggtaaaactgaggaaacattatcagttggtgattcattgaaagttgtcattttcttatcaagaaaaaataaagaaacagttttcacacctatagtcacagagaatagtgaaaaacgttttgcttggaacggtgttttattatcatcatggattttcggtggcgaacatagttttgaatttgaatcaattgatgagaatacaactaaacttattcaaagtgaagttttctctggtgctatggcatcaccaattttttggatgcttggtgaagattcaactgcaggtttcaaattatttaatgaagcactaaaggctgaatgtgagaaataatctagcatttatttactactgtttttttaacaacattactattactattactattatcattattatataatatgtataattcaagcaagcaatattacgatatatttaagagtagataaacagacaaaacgtaaatagaatgagaaagaaaagcaagaaaagatttaattaataattatagctttgttgctgtaccatattactattattttcaatatctaacgattgttgttgttgttgttgttgttgttgcatattttgttgtaaattttgttgtaattgttgttgttgctgttgttgttgtgggtatacttgttgtgggttattatattcatcaaaccaagcatgatgtaaagcttgtcttgcacttaatcgcgtatcaggtctcatttgtaataaaccttgtaataattgtaaagctaatggatcaatatttggtattaaaacacggaaatcttgcggtacaaataatgtaaaatttgatttataatttggataatttgaaacacctggccaagtacgttcatttggtgtacccattattctaaaaatttttaaaagttgatcatcatttgaagaacctgaaaataatggtttacctgtaaacatttcagctaatatacaacctgttgaccacatatcaattgaagttgaataatttcttgaacctaataaaacatcgggtgctctataccataatgtaacaacttcatttgaaaaagtattaacaggtataccaaaagctcttgctaaaccaaaatcacctaattttaattgaccctttgaactaataagtaaattttgaggttttaaatctctatgtaaaactctattatcatgacaaaataaaatacctcttaataattgatacataaaagatttaacagtacgaggatctaatgcaccatttgaattatatccattcatatccatatatctctttaaatcactatccataaattcaaatactaaagttaatttattctctgtatgtataacatcataaagtgtaacaatattttcatgttttaattctttcatcaatgaaatttctctaattgcagttgaaggtgtaccttcttcactatctaaattaatctctttcagagcaacatatgtacctaatgctttatttttacctttataaactgttgcatatgtaccttccccaagtttttccaactgttgaaattgagatgaagttcctgacatttcaattgttgtttataatagatatctataatctacactaacgaaccacacgtgtaacctacttacctctatagatactactcaaataaacttttgcaacaactccttccttccttccttcctaataatcatcgctgagtcctgttgtgtccaaattctttcaaatggaccgcgtgtccgtcccatcgactgcgacatgattatttatcattttatcgtgtttcagatcagtttcctatggggaagatggaagggtatatgcttttagagaagggtgctgacagtgattgaactgtatttgtgttggttcttggttaagaggaatcggggattgtcatttgacgagaaataatgtcagaaagatacgttactgtggatttacactgtacagaacaacaaaagaaggtaatagtagaaccaccggggaagaatacacttataaatgtattatctggtccaggtactggtaaaactaaaacactgtgtgatagaattgcttatttaatgagtaatggtgttaaaccttcagaaattgcagttttcagtttaactaatcaagctgtattagattttaaaaaatcattaagtaaattattaggaaatgaattatctgaattagttagtgtttcaacaattcatggttatgctaattctatattattacaaaattctaaatattgggatgttctcaaggataaaaatactttaaattcatcaattttaagttcaattatagaaggtatgtcattaagtaggaaggaaaattatattaaaataatagaaaaattatctcctaattctataaataataatgttaagtatttacctaaaatatcagaaagagaattgaaattgttgaaaggttcagatatacagaaatacaaacaatatttaagtttatcaccacataatcctgtaattaacttcacatcgaaaaattcaaatattatatttgataaattagtatatgaggctacattaatattaaatgttaataatttaatattatccaataatggtattgaaaacaatgatgaattgattaatttaacaggtgaatttcgaatacctacagatattttaaatttaaaggaaattataattgatgaatttcaagatttatcagtaattttacttgattttgtacttgaattatctaaaaataaacaattaacaatttcaggtgatatggatcaatcattatatggatttaataatgcaactccttatgaaaatatggaaagattagttaatcattataaaaaacctaatcataatttaaaacattttgtacttaataaaacttttagactttcagaggatatacataaattttcattaaatgttttaggagcttcagatacttttattacaaatttccccaatgaaactacagagattccaataattaggaaagaatttacaaatttagttgatgaattttcatttgtttataatgaaattaatcatttaattgaaaattctaatggtttattaacacctaaaaattttgcagttttagcacctgttaatcaagttttagataattttcaaacttatttccaaaataaatcaagtaaatttagatgtaaaaaattatcaggtttacaaccttggcaagatactaaattatcatcagttgtatcatttttgaaaatattagataatccacatcatgatccttcattactcgttgttttaagttttttaaataaaattggaccaagaactgttttatcattaaaggaagaagctgaaaatgataaaatttccatatatgaattaattcataaaaatgaaaaaattaagaaaaaaataggtaatgaaacgattgaaaaattagataaaattttaacaaatattgataaatcagatccaacatcaattatttataatttaagttgtttatcagatttattttatttttctaaacaattgaaaacggaatcattatttgataattataaaattttcttaaaggaattattttataatttagaagttatctctaaaatagataatgaagaatataatattttatcatatttcctatcacattatcaagatgattttcttaatgttaaagaattagatgatacagaaattaataaatttcaacattataatgaatttatttcattatcaacaattcataatgcaaaaggtttagaatgggatattgtatttgttttatcatcattatgtttaatgaataatgaatatagtattcaaaaatcaagagttaattatgttgcagcaactagggcaaaacatattttatattttaataaatcaaaatttgatcaaatgttacatgttgataccagtaattcatcaatttatcataaaagttttgttaaaattgaatatgaaccatctttattagattgtttacctgaacttaaaaatttaacaaaacctaataaattaactaatttaccaaaatttgcaaatcctttaagtgatccaaaaagatataaatttagtcaattggtagcaaataaaatttacactaattctaatagaaattattctacttttttaactcgtggaattcatttattaaggaagtttagataacttgtataaagaacattatatatacccaatagatagttatataactaaccatatacataacaatgttacacgtagcaaaaccatgtttcaaaagtatttaaagtgtataagatcaacgcgattttgctatgtatcctattcttgggtgattaactacattgtcagtttcttcatagcaagggttataatataagtagtgatgggccagtaaataaagtagatggtgtatgtagtttcttttcagctgatatagtataaatatatttttaaaaaaccaaaaagaaatacttaatgatcagtgttgaaattgatgataatgatgaaagagttatctctgcaccaataggtcgtggtaaattattaaaagttattcatcccgattccagcaaaaaggaggaaatatttataaagagatggaataaaatccaatctagaataactaaaccacatttaacattatttaattctgatgaatcaatgaaaaaatttaaacaatcagtaaatttaaatgataaaggtaaatgtaattataaaacttttaaaacacttattaatgaatatttagaaattgaacatccaaatattaaaattttagatattaaaaaaattaatgaatttaataaaatatttgaagattatggtattcaaatttcatttgatagattgaaaaatacacttcaacaattaagtgcagttaatatatcaaatttaagagaaatggcatcatttgagacaagattaagatatggattaaagaaaaatgaatcattaattgttaaatcatatattgaaaatatattttatataccatattcacaatttttaagtcaatatgaacaattaccatcatttgttaaatttttaaataaatatcattcaatttcagttatgaattttgaaaatttatcaaatgatgaagttaaatttttaggtagatatacatcaaataaatcattagtcatttattctgatattgaatcaaagaataaacctaaacaatttgaaaataattggaaacaaattgattcatattttaaaaatattagagaagttgaattaacaattcttgaaaaagaagaaagtatcaaagaagagtataataaatcattattcgttcaattagaagagaataaaaatcaaattaataaaaaatccttaaaagattttattttaacaacatttaaaattttcaataatcctaaaacttctaatttagaattattgaaaattatttcaattacaccaggatttgataaatattttattaaaacattttcagaattagttgaaagggaaaatttaccagttattgaatttattaataaatattatgattcatttagtgataaaacaaaggaaaaattattaccaattattaattatattaaaaatattcaaattaaattaaataaaaatgatgcaaattcaattatgattcattttttaaatttttgtaatataattgaatttgatacaaaatcaaataaagaaattaaaaatcaattagttgatttacatatttggttgaaaaaattaaataaaagtaatgaatttcaaatttttagtaatttattagaatgttatatggaaaatgagatgaaatttaaggaaattccttcagttaataatactattccaattttacaagacaaaaaaccaacttcacaacaaccaaaattaatcaatacaatggttaattttaaattacctgtttcaatatcaattgataatactagtaataaagaaaattcaaaattaaacttaaatggtgaagaaacaccattaagaagatcaggatctactaagtataaaccaagaccacgcagttggcatgcaggtaatatattcaatgcagctaggaaacttaaataatttcatttaatttagtatagttcttttacttctttttatcatttttctttttaacaattggcatttcagtaagtaaaaatttaacattcatttctaatttcttatcttcataattataattctgattatttaaaaatccaatattaatatcatcaattgttgaatctaatgtcaatgaaataaatttattatttttgataattccctctcgtaatgctaaaaattgtatatcctttttaacacctaatgcagtagataattttttagatgaacttttaggtaatgtaattaatttaacatttgcaagtgaacataaaactgggaaatgatcatataataatttagatgatatatcatatttacaaacaaataatactttaattttattctctaaatctttcttacttatttgatcctctaatgatttcataatagaattaaacccatataaaacattcccaatatcattaatcattgattgtttagttatatcgggtaatgattttttctcctctaaggataaattattccattgtttaattgatgttaaaatatcagtttctaatgcttgtaaaagagttaattgtaaatttggttcaattcttggccaaatatttctcctcgtataaggatttgttaataatggtttaaaaattgttcttttttgaatttcttgaccttttaatgaattatctgatggttttgatgacattgtggtggtcaatgaaggaaaaactgtggattttataaaagaattcaagatttgaagaaaaaaatttattcatgtagtggtggaaattccgaaatttgcgaaatcagtggtagcaatggtagcaagtagtatgatatgatagggtatgatatgatacggtatgatatgaaatggtaagatgtggtatggtataaatactatagaattataaaaaaacctaactaggggtataaataggaggatgtcttggtaaacgagatatattaagagttggagcaggttcaacaattgtaactgaaccaaatcttacagttcttgtatttgaagatgatgatgatgatgatgatgatgattcttcttcattatttggcacctctcttgaataacttggtaatttttctttaattttctttaatttatgtgaaggtaaatttttaggtaattctaataaattaccattattatcaattatacctgcatcaatttcaggatttggattaacagtatataatggaacgggtctaattgaaggattaactaattctcttaaagcttctaaatctaaataaacatcattttgattatttgcaataatatgatttttcaaataatatctataacttttaaataagaaaataaagaaaataattgaaattattataactaacataatcattaaaatttcaaatgttgtatcatttggtaaaccacatttaacaactccattaatataataaccaccatatttacatcttggtaaataaccaactaaattttgtaattgttcattagttaatctatcaggcattgttgttaggaaaagaaagatatgaaagatatgaaaaaagttacatgaagggtattgttaataaatatatatttgaagaataacagaacaggtagtatgatatgtgatatcatagtatagcatattacagaacagaacattatatataggggggataattagttttcctaattgggaaagttaagcgaggatattagttattattacattaaatgatataaagaaagctattaaagtaaagtaatataagagattaaaggattaaaacgtataagaaagtgagataggattagagagaaacaattggttaacttctgtaatgacttttatcaggtaatggaggggcttcaggtgcaatataaggaggtaattctggttcatttgtattcccattattttcattattattttcttcagatgaagaacctacaatcatagatgtggaaggaggttgataagttctatttggaggaggttgatcaggtcttctataagacatttcatttaatgattgatttggattttgattattatcattaatgtaaggttgttgataaggattatcattaagctctattgaattagtagtagtggtaatttcattattattattattattattattattatttatgttactatttgcaggtataaaattaccatttttatcataataaccaacatcttgatttggattagcagcaggagtataagttggtaaattagttacaacttgaccttcataagcagtttgagattgatgataatttggaggagataaataacttgaaataacaggagctctaccagatttcattcttttaacattaataacacaagtcattataatgaaaacaataattgcaagaacgaaaaatgcaaagaaagcatatctacctgcatcaccaccatcactataccacatatctcttttaaatagattattatttttattaatagatcgtataattttattttttaaataattatcaaatgatgatagtatatttgataataaagataatgaattattatcattattattattatcagtattattatgtatacatggcatgattaaaagtagtaagtgaagtgataaaagaagggaagtaatggaaaagaaagagtacaatatataacagatcaaaaacagtatcaataataataatgatataaatttatccaataagtcctgtataatattaatacagtcattaatatagtgcgtatagtaatattacggagataatcactattttatttccaatattacgtaatggtcacgtgatttagtgtttacgtaatggtcacgtgacagtattttattacataatcaatcacgtgaccattacgtaattctaataaaagaggagaaataatcatgaaccctggcaatcactactccgaaaaaatttaaattttaaatcattatatatcatcggattattttaatacggattattatattatcatgtcaatattctgtcctttatgttttcatttcatttacatgtttaatcttttaatatctttcacagaacagtattgtactatctttaatcacttaatatattatttttctatcttttcacttttactattcttaacttcacaactgcttttttattcttattctcatcttcatagcacttcttcttttatagagaaaaaaagtttttacttaattctacagccatgccaatacataaaattcatttacctcattctccaatattaaatgataatcctactagtcctactagtcctactacaatatcaacaaataattcacttcataatattttttcacttaatatgaaaaattcaaattcatttaatgattcatttaattctcttaatagtactttaaatacttcaattcataataaaatagataatattaataataattataataaaagtcctaaatcttatactcgaagtataagtaatacaagtttatctcattcaccaattttattatctcataatagtagttcaagtataattaataataataataataataatatcactaacaataattcaattgatttacttaaaaaatcttattcaaatttaaataatttaaattctaatactttttcttcaacttcactgcattcaatgttatcaaatcaatctgcaacaactgaatattctccaaatttaattgaaaatgaatgtggtgatttattgaaaattgttgaattagatttatcaaatgaaaatgaaaataatgatgataatgatactaatgatgatgataacaatacaactcaatcaaatatagatgaaaatatctctaataaatcaaaatttaatacagttgattcattccttacaaaacatcataaaaataaaccaaaattcaacattaataatgatctctctactgattctgaagatagtgaaactgatattgattatgatgatttggaaatttatgaagatttatcagataaaaatcataataatattgcaaatcatacacctttacgtaaagttataacatcaaatgaaatttgtgattcatgtaataatgcaaaaattgaaactttttatcaaaataataatatatcatttgattataatgattcttcatgggataaaaatgaaaaatgggcttttatagtaattggtttaccagcttgtggtaaatcaactataattaatgatttccaagattatgttaaaaatcatacaaattcaaatataaatgtaaattcttataatgcaggtgatattagaagaatttatgaaaatgaaaatcataataaatttaattttaatgatttaaaatcaagtcaaaaattaagagatttttatgcttttgaagcattgaaaaatttaacaaatgatttaattaataataaaattaatattggtattttagatgcaactaatacaactaaaaagaggaggaaatctgttttagatcatttaaagaaaattagtgatcaaaataatattaatattaaacctttattctttgaaattaaaacttcaaataaagctttaagaagatataatattgaacaaaaatcaaaaaataaagattatattcatatgaatagagaaattgcaattaatgatttccttgaaagaattcataaatatgaattatcatatgataaagttacattagatgaaattaattcattaaatgttaaatattttggtattgataatgttggtgatacaatttattatgattgtggtttagatcatcataaaaatacaaatcatgaaaatttaacttttaaaagtatttcacttaatttactttatcaatttctgattaattatagaactttatatgcaggtgaatatttaactaatgttaataaattttatactgaaggtcattatatcccaattcaaacaattttttcaagacctgtaactcctgatgatttatccaaaatgagattaaatcattcaaatcaattaatttctcaaacaaataatacaaataaaactactaaaactactgaaaatccaattaaaaataatgaaatacctaatgacaataccccaaattttcaaggaataatatcaacttgaaataaacacacattttatgattcctttctttcctctttaactcttatttttttatatataatttatatatccttctagctctaatacctatatataaatatatattacgatccaaatcctggaatattacttaaacctggtaatgtaaatggttcatcattcttaacaggttcattaagtataggtactggatctaacattttcttttcactttcaggtcctaaatgtgcattatctttaaagctttcttcatcatttggtcttgatctaccccaaaatctcattgatttatcagctcctgcagtacataacatatgacctaacggatgatattcaattgcttgaattgccttatcatgtgcaaatggtattgaatgtaatgcattatttataattggtggacctctattaattatatttgaataaacataattttcaatttcttcattagttttattatcattctttaatttattaatttgttttgtaagatcttttgtttcattatcattattattatcactattattttcactattattaacattatttgtattaattgtttcaatatctgcagttttatttatattataatgtgataatgaaccatcatatgcaccaactgttaacattgttgaatgaattggatgccatgataatgatgttaaatctgcttcattttcactttttattatagttaaacatcttaacattcttaaatcgaaaattctagttgaatgatctcttgaacatgcagctaataatctttcattaccacctttttgaaatgatgttttactaactgtatgtttaaaatcatgtaatgttgttatacatgaaccatctcttggatcccataatttaactaaattatcctttgaacctgaaacaattaaacctaatgatgaatgccaatcacaacttttaacatcccaatgatgaccttttaaaatattttcttcctttgcacttgaaaaatcccaaatttttaaagtttgatcatctgatccactaacaaatttaaaatcatttggtgaaaatgataattcattaacagaattttcatgtgatttatttaaaatattaacattattaaaatttggttgccaatatttaatacaacctgattgatcaccactaattaaccatttaccattatgtgaatattgtaatgaactaattggaaaatcatgagcttgcataattgattcaaatgaaaaatttaatccattccaaattgtaaattctccactaaatgatgaaactaaaactcttcttgcatcaggtgtccatttaattgcatgaattgcatgttttgatttatttgttgatatatgaacaaatttacaatttaaatcaactatattaggtaattcatttgatgatggtggcatattggttacatatgatgcatcaggtttaattgatccaatttgaaatgcacgtcgacgtcttctattataaacattcttagttatcatgaatttccccactggtgtaaaataatctaaactattcttatgttgttgctgttgttgttgttgctgctgttgttgcagaagctgctgttgttgttgttgtaagagtaattgtggttgttttgatgatgccattgtcaaaagaagaagtcttgttatcagggaagttatgaaaattaaaattctgaatttttcaacatgttcaaaaaaatttatatctccataataaatctttctttttcaaatatcatcaaacaatcatggacaatatgaaacttgatcaaattaaacatattggtcctatttgtgcattaaaagttatttcaaataatttacttctaagtggtgaaggtccaacattatcattatatgattatatcaaaggtgaaaaaatttttgaaagattagtatttaaaagaaataaaattcatggaattgaaataatcaatagcagtaattgcattgaagatgatattaaaattgtaatttggggtggtagatcattaagtattttcacattaaataatttcaaagacttaaattatgaaataccacattatggtgtaagtgattggattttccactgtttatttgaaaatgaatcaacattacatgttttaaattcacataatattgttcatactgtttcattattaaatgataattgtaaattaatcaacacaagacattgtggatggaaatcaattctttattcaggtactatatccataaataaggaaactggtaaaattacagttttagcaggtactgttatgaatggtattttaatatgggattttgaaaattgtcgggttaaacataatttaactgaacatgaaggttcaatttttaaagttattgcatctcctgataataaatatattattagttgttcagatgatagatcaattaaagtttggaatatggaaactggtaaattattagcaaatggttggggtcatggatcacgtatttgggggttaaatgtttacaatatttctaatgatggttttaatattttcagttgtagtgaagattgtacagctcgtgtttggagatttaatttccataataattataataatggtgaattaattcaagaaagaattattttagttcatacaggtagacatgtttggagtcttgatttaaatgatgaaaaaaaattaggttttacagcaggtgcagatggtaaaatatttgtatctgatttaaatgaaagtgaaagagatggttattggggtcataaatgggaattaaatgatatatcaaatgaaattaattgtgttttccaaaagggtgaattaattaaaaattatagtgattttggatatggattaattgctgttacatctgaaggtaaaattatgattttaaaagattataaaaaatgggaattattattcattgatgataaatttgcaaaattttgtatacttaaaatttttgaaaatgaacctattgtcattatagcaggtaaaatgggtgattgtatattaatgaaattcaatgaaaattgtgaaatagaaatcaaacatgaattcaatttaaatgattcctttaatagattgggtaatattttaattaatgaatatgatggtaattattttgcattatttgaatcaccaaatcctaatgatccattaatttataaaaaaattgatccaattaatttaagtatattagagagttatgaacttttaaaacctaaagataagattactataagctcattagaatacaataaagtatcaaatatgttatttgttggttgtagatttgctacaatgcttgtttatagaattgaaaatgaaaatgaaaaaaatgaaccattagtagtttataaaaatcttttcaaaggtgatacagtttcttcaataaaatcattatatgataattcaaataatactatgctttatataactaataaagatggtacttatcatataatgaaaattaatgagaatttaacttatgaatatttacaaagtagtagaattcaaaaaggatttttagaaggtcatattaagacaccaaatggtgatatacttttgtatggttttaaatctgattgtttctttgtttggaatgaaactaaacaatatgaagtttatagagaaatctgtggtggtccacatagacgttggaattttaaatactggtttgattcaaataatagattaagatatagatttgtttatacaagatcatctgaagttcaaattgttcaacagggagaaccatatgcagttgaattattatcagatggtttacatggtagagaaattagagatatttgtgtaattaattcacaaaataataatgatgaaaaaattataattacaggtgcagaggatacaactttaaagattagtacattgaaaaatgatggtacatttaattctcattggacttatagagaacatattggtggtttacaatcaattcatgcaattaatgatgaatatattttatcatcatcagctaaggaagaactttatctttggaagattacagaatgtgataataaaaaatgtatgtcattagagagttcattaccaccgagtgaagaaaatcctgatttaagagttatggattttgattctatagaagtatatgataaaattaatggtaagaagattggatttttaattgttacagtttattcaaattcaatgattaaagtgatttattatgatattgcatctaaaaaatttaaagttttgatagatgataattatatgcaacgttgtattttccatgttagatttgtttgtattgataaaagattatttgttcttattgcatcaactaatggacatttaagtatttatgatattaataatgttattggaaagtatttcagtattgatgattctaacattaaaggagttaaactttcattaagtgatgataaatttgaagaaataaatgagagcaccaagttagataaacttatcattaatcaacagattcatcaatcatcagttaaggcattagatatattacaagaaacaaatggatgtattaaagttattacaggtggtgatgataatgctataattgttagtaaaattactaaaaatgaaggtttgaaatttgatattgaatcatttattccatctgctgcatcatcaactattactacagttacagttattgatgagaaaacagttttagttggtgcagttgatcaaagtatcaaattatggaatattgaaaatggattaactcttgttgataataaatatactacagtggcagatactggatgttctgaaattgcatcatttaaaaatggagaaaaatatttactgattggtggtgcaggtttctcaatttggaaaatcaccaattagtgtatatagtattgatactttataagctgtagtgaaaattagattgtgtaactatatctatatttataaaaatgtgttagattagataaaaactataagcaggaactaaaattgtaaatttgtgtatatattgaataaatggtattttttgtacttgtacttttctctattatgcttgcttttgcttatgtttaggattagccttacatagcacatatactctaccttttcttcttgcaatataacattctgaacagaattttttaactgcagttcggattttgtatgatcttgagacattgttcatgaaagaatgttgcatattaatatttgaatgaacgtgttcatggttacaaacatgcttagcggcatttaccgcctgtcccattctttggagacccaatctgaagttattgaagagcattgttcagtgatacacagtcagattctattcaaagacttaaccaacccctaacccaattgaagcacttatactgtaatggtggaaaattcatgttgaaattttccatcgattaaagaaatttcttcttaaaggcgtcgcgtcgtttgcgccggtgcgtcggtgggatttttattttggcgttttgcttattgtgagagaaatgaaatgtttacatgagagattaataagaagaagaggttgctgttggtgataagtggtgagttaacttatatagacaccataagtgaggataatatagtctaaaatggaaaattgggcatgggtatgtaaataaattaatacaatttttaatttaaataatcaaatactaactactaaacattaatataacagtttaatacgatatcagtgctgagatatccgaaaggacatataataaatgccaatgatcctcaagtaataacatctgcaattaaatttgatgattcatattccctattatgggttggtaattcattaggttatttaacttcttatagtggaccaaaattacaaatgtatacatcagttaaagcacataatggaccaattctgaaaataatgacacataaaaagggtataatgtcattatcatttgattctattagattaggtactattgaaggtgttacacttttcaatataaaatcagattcattacaaggtataaatgcaatgacttatacatcaaatacacaaacagaattattagttggtggtgataaggataaaacgggttcaaaaattttcagaattgatacaattaatcattgtatatcaagttctttccattatccacatagtgttgtgtttttagaaactaacttaaaatacgttattattggtagatctgatggtaatattgatatacttgacccaaagacaaataaaattttagaaacattttatgcacatgtttcaggattaagtgatatatcagttaaggaaaataatattttaacaacaggtttttcattaataaaagatcaatttagtccagatttatttgttagttcgttcgatttgaaaactttcactacatctacaccaattccattccccgttggggcatcaaaagttttccatcatccattcttacctaatgtaattcttataacttcaagtttaggtcatatgaactttttggatgtgaaaaatccaagtaatataaatatttatcaagctgatgttgcaaattatataactgcatttgatttatctccatctggttcttatatggcatccgttgatgcaatgaataatttacaattatggaaacgcaattcaaatgataattctgaattttgtttactccctggacaattaacatatcctacaacaactcatgaaataatacccactaaaaatcgtttagtaagttctgattcccctttcaatttgatcaaacttcctccattttataaacctttactctctgcttggccaggagatatggttttcaaagttggtaaaattccaaatcaaatagatccagaaatactgagaagttcagaagttataaatggatttattattgcaagatataataaagaaaaatttggtcatagaaatattgcaactaaatattatgatataactgctcaaactgttgatggtattaatgttccaaaattcatcagtgaaaggattgataatgaagaaaatgaaggtaatgatagtatggttgatgatgattcatcctatggtaacccaccaaaatcaaagagtagtaacattactgatgactctaaaaaatcttcaaatgatcaaattttcgatttaacttcaattcatggtgatgttccaactgcttataaacaattatctattttatacagtagatttggtgttgatgattttgattttgatttttataataaaacaagatactccggtttagaaataaattctggaaattcatttttaaaccctattcttcaactttacagacatgttgcacctatatttaataattgtttagcatcattatctcatgatgttactgaggaacctaatttattagttgaattaggttatttatatgatatgatgtggaaatcagaaggaaggcattgtgctgcatccaatttccaaatcttattatcacaaattaaagaagttcaaaatttaggattagacaatgaaacaaatatatcaagagacgattttaaacaaaggagactgattcaaacatttaatagatttttattagaaagattatcacaagatgaatgtaaattatacaaagaggaaacatctaaaaatttaaatgaaatcagtggagtcgttacagagacaacagtttactctaatttttgttcattgactcgtaaaagattagcaatgtattattcaattgatattaactcattacctaccattccatctgttcctacaagtgttactattttaaattatatggaagcatctatgaataaacatattcaacaacatataaattgtgaaaattgtggatgtcaacatccagtcaatgcatcattagaaattaacaatttaggacctgttgttatacttaatcttgatttaactaatcaacaaatgaatgaaattagatatttaaatggatggttagttcctgaattttatttcgcattatcaccattaggtacaccagttttacgtacaaatattattggtggtgttgcatctaatttgaaaaaatatgaattaattggttgtacagttcaaataactaatagacaaaatgaaagtcatttagttacttattctaagattaaggaaaatggcgttgataagtggtacttattcaatgatttcttagttactgaagttaatgaaagtgaagttttagatcattcacattggtggaaaaaacctgttgttatgatttacaaagaagttaatattggtaatgaattcaaacctaaaatctatatggataatcttgataaatcaattctatataaagattgttttattgataatggtaatcgtgaaaataaagttattagttataaattacttgagaaagatgaagaattgaaacctggtacattagttgcattagatgcagaatttattgaactttcacctgcagaatatgaattccgtagtaatggtactaaaacactagttcgtccaccaaaattattacttgcaagaatttcagttgttagaggagatggaccaagagaaggtcaatgtttcattgacgattatattgcaacaaatgaacatgttaatgattataaaactacatattcaggtattgttgaaggagatttaagaattggtaaatctgataaaaatttagttagtctacaagttgcttatagaaaaatatggttattagtcaatcttggttgtaatataattggacattggttaagtggtgattttagaatgattaatatttatgttccacctgtacaagttaaggatacaggtttatgtttctatttaaggaaggagaaacgtaagttgggacttaaatttttggctcattatgttttagatactgatgttcaaagtggtaatcatgattccattgaggatgcacatacttctttattactttacaaagaatatctgaaattaaaggaatctggtgatttggagagagttttgtataaattgtatcttgacggacaaatatctggttttaaagtgccaacagaggttactttgaagaagtaattattatttttacatttataaaatgtttagaaacactttttgtaatatagtctttagtatagttttttatagacgaactattgttaagttctagaagttgattttatctggcaggagattgcaactttactacaatgtactataaatcaagaataagtaaaaatactaagaatctggttttaatctatcaccatttcctgcaatccatttttgaataattatttgagcacctaatggaatatttaaagatacatgaaatgatcttttaaatagctcctctgtatttgatgtgaatataataatcattattacgtaacgctttgtttacatgtaaagttctgtccatgagtttctctatataacgtacttccattcggttgtcccacctaaaaaaacgctaacaaaaaaatcaactcttgcatgccgcgttttgtatgggagcgctaacaaactgcgaaaacggacaactacgacagatgcaattttttctcaatgtccaactttctgcactttagacgcacttacttacacaaagcgatttccaaccggtttttttcactttccaccaagtgagtttctctattaaaattttgaaaagtaaacaaagtcagaatgtaagcaaagcaaacgcattttcagtcgcgtcgttttgcttttttaggacattttttttttcagttgatccacctagaacacgtaaaagaagataagataagaattgcaattccgagatttcggagtaattgaattaatcagtttatgtttgggagatgtttgattagtttatgcttaacataaagaaagaaatggttaatattataatataaaaaaagcaattgttcatttttttattaataatctattttctcttttttcctctttcttttatttcctttcgcatttctcttattatcatcaaagattagtattttcttcaatctattttttctgtttccccattggttttaccaaattttgaaaattctaatgcaattgttggcaaacaatcaattgaaaaaggtccaactgttgaaacttcatctgttgatttctcatcaattcaattagttgatgaatctgatgctttagaaattcaattcaatgaaaattttatcccaaattcttaaattattcttttaaaggatgatgtttctgatgatgcttttgaattccatagattatgggtttctgatgttcaagttcaatcatttgcagaattggatgcaattcaactcgatgaatttgaaacttcagttaaaagtcttgattttcaatctgaaatggggtggtattaatcacgtttttgattctccggatttaaggggttattcaggtttgttcactcctgaagttatcatttttttgagacgttcaaaggacgttgcagtcattgaacttgattcagttgttcatgcaattgaattcaaaactcaaaaaagtgcttcttggggtttatcaaggatgtacttttaataaatattatatgatgatgatgctgataaaggtgttactgcttatggtattgatataggtgtgaacatcgaacatgagaaatttgaaggtagggctgtctggggtgcaactattacatctggagattctgatgttgatggtaatggtcacggtactcattgtgctggtaccattggttcaaaatcatatggtgtctccaaaaaggcaaaaatagtggcagtcaaagttttgagatcaaacggatctggcactatgtcagatgttgttaaaggtgttgagtttgctattaaggctcatgttagagaagcaaaagattcaggatcgagttttaaaggttcaacagctaatatgtcattaggtggtgataaatcttctgcattagatttagttgtcaatgcagccgttaaggctggtttacattttgctgttgctgctggtaatgataatgctgatgcgtgtaattattcttctgcagctgcagaaaatgcttttactgttggcgcctcaactgtttctgatgctagagcttacttctctaattatggcaaatgtgttgatatctttgctcctggtttagatatgttgtcaacttatattggtcctggctctgcaacagttttgtctggcacttcaatggcatatcctcatgtgtgtggtttattgacgtatttcttatcattaacaccagcttcggattctaaattttcaagtgcaaatattactcctaaccaattaaagaataatattattaaatatggttctaaaaatagtttaacttctattccagaagatactccaaatattttaattcacaacggtgctggtggtaacattagtgatttctggaatcatgaagagtcatcaactgctcaagatttaattgaaaaattaaacgaatatactgagtcaaatttcaatggtgctaaaaatgaaattaagcatttaattgatgaaattgttgatgcagttgaacatgtcgtttcagctggattattttgaatagaactaatttttgtttttttagtaagtgtttggtttaggggtatttggcgtttattattgggttaacttttttatatttatgtattattatttctttttttacttttatattcatctttactaaataaattatatgtagatatacaatagactgaaaaagatcaaatcaatccaaaaaaaattctattttgtagcaagctgaataaatcaaacaaccacttgaaacaaacttaaagatcaactgtccgcggagaaacaattaaagagaatttattgttgtaaatttagctgtttttgttgctgttgttgctgtaataattgttgatgatgatggtgttgttgatgctgttgctgttgttgttgctggtgttgttgttgttgggcacgtgttgttggatgatatctagaattcattccaacatttgatgaatatgctgaagtatggggtctattatcattattatagttttgttgttgaccaaacagtgtacgattaccacgagaatatgtattagcaagttgactggtgttactattattattcatattacttgattgatttgggtacctcagattatcttgttgattctgttgatattgttgttgcatttgttgttgttgtatttgttgcatgttttgttgttgattgtaagaatttgaattgtatctttgttgttgttgctgttgttgtttatttagttcttgatttttcatagaggtggtggaatcagtaaacttgatacaattctcattccacatatcaagtaaaattttgttatagtcttcggtgttagttgtaaaagtatcctcagttttagtttctgcctcttttagggaaaatcctaaacttttagaaatagattgtgcaaacatctgttgtttgacagattttgaaatatgggatgaatgatcacctgagcttgagccatcaatactaacacgttgttttaaattttttgtttcttgaattctagttaaagattctaaaactggatttgtataacgtctaacattaagaaattctcttgatacttgttcgtattgaaatctggtagtttggttaatataattcaatgcattacggttatttccatcttcagaatcgtttaaagttgcaacattttctctttgaagccaaagtttttgttgagtacgagtttcaagttctggttcctgtgttgataaataagaagataaatctaaagtagaaaaatcaacttcatttgaagcgttattctgtgtttttgtttgtttagaaagtaacgattccttatttggagactcaattgaacttttcggtttgaacattgtagatgtactcgatgcctctttcattggtgggggtgttgataaaggtgataatgatgactcttttttctgtgacataaaatggttttgacgaggttcaggttcatttacggatctattttgcgattccttaacttcagctggtggaggaactggagatttgatttgatttgccattgagttcttcaggttggtcagttgtagcttttgttgaagattttccggtactttgaacgaaagatatgattcttgacgttgtaatgattgttgtgaaactgtcctttgcattgaatttgtatgagaatgatggcctagatttttattagatggttgtgagttcatattgtataaagttaaaccagattgttggaaaatcaaagaatctgttttattcactgaattagtatcggagacggatgagtcagaagttgtattgttagattcattcctcgttgttacattcgtgaaaacattttgtttcggttgattgtcatactgtggattcaaaggtttttgatgctcctcactcaactggagtgcaggtgctgtttctaaattagttgtttgagataatattttggaatttgaagagttggaattaacattactgacatcacgttcttctccaacagattgagataaaacagattgcatcctgtacattgtcaatgaattgttaatttcaggtaaatcactatctttaggcggtaaatttgatatttcttgtgattttgtatttgattccattgtattatcaaatttatcagttgaaacatccttcggaacatcatttataagatcttgcggtatttcatcggagtttttgcttggagttggatcatttttagatacttcatttaatttagtatccaaagcttctgttgtatgattatgttgaagttcttctgaaatttcatttgaaactttatccaatggctctgttgcgtttttctctatttcttcacctgatacttcatttgaatcctttactgttggttcagtttgatcctctgctggtttatttatgtcatttatttcaatcgtagtattttctgtagcattattgacatcttccaatgtgtcttccacctctgtctcctctgcaactctactgttatcttctgcttgaggtatatcattgagtgtatgttcagctattacttccgaaacatcaatgttttctgattctttttctacttctttttctacttccggtgtattctcttcagtattttgaactgttctctctatcaccacactatcgttgatttcatcgtcacttaaatcaacatcagctgtattgatatcatttatttctgtattcacagaattgaggttatctgatgacattattcttctctgtttaattaaaattaatggtttcctactgttattaagttctatattcgattgagttctaattaactctggcctatctttaaatttagtgatactgttgttagttttcaaattagtatatgatgaaacacgagacggctttttattggtcttcactgggaaagttttagtctgacggcgtctacttaaaggagttgttctacgttgtgaatcctccgtatattggcttgtttggggcatatagtaggggtttatgtatcttttgcaaagtaaaagagttcgtcatcattaactggcaaaaatgagtttatcgtaatcaaagattcgaaaagcgagaccttagttcttggagcttgttgtatataattggttaatatctgatatagtctttcttttaagtgtatattagtaaggaagggacaatggatacaattaatacttttggggagatggatctctataaggtggcagatagatatgtggaggaaatgcttggtaaagacaatgacacatctaagaaaagttctataagagtactacttctagatcgccacacatcatccattatttcactagtttctacacagagtgatttattacagaaggaggtttatcttgttgataaattggagaataatgaaagggataagttaagaaatttagagtgtatatgctttttaaagcctgatgatgttacaattaccaatttatctcaagagataggtaatccgaaatactccaattatcaaatctatttcaataatgttgcatcaaagtctagattagaaagattagctgaatcagatgatttggaaatagttgataaagtagttgaagtttttcaagattattatgttttaaacaaatctttattcacaataactagtattggtagtccatatatgatcaataatacatcattatgggatcctaatactcttgaatcaagtattgaaggattaatatcgttattattatcattaaatatgaaaccaattataagatacgaatctaattcacgagttgcatccaaactggccaatgcaatcaattatgaaattacttcaggtaaagatgtgatatttaaccaactgaaatcaaataaagatgtaccaccacttttgttgattcttgatcgaaaaaatgatccaattacaccattactgtttccatggacatatcaatctatgataaatgaagttatgggtataaataatgtgagaaacagtgttgatttatcacatttaagcaatataagtgaagaattgagaactgttttgatgaatcaaacacaggatttattctatgaaaagacaatgtttatgaattttggtgatttatcaagttatttaaaacaatatgtcgatgaatataaaagtaaaactaagaccaattctaatatctcatcaattaaagatatgaaatatttccttgaaaattatcctgaatataaaaaaatgtcattgaatttatcaaaacatatgctgatatccagtgaaattgataaacaaattaatgatttaagagtatgggagactagtgaatttgaacagaatttatgtagtaatagtgatacagcacatcatgatgaagatttaaaagaattggaaactttactatttgatatgggtgatggtaaaaacaaaaagataataagtgatgaaattaaaatgaaattattaggattgtatgcactcaagtatgagagtttccatgctaatcaaacaaatacactattgaaaagattaaataatattaaatttgataattttgttaaagctataataaaatatgggggtttgaagagtagaatgaagaattctgaaaataatgaaggtaatatatttaataaaattggtagtagtaatgttaatagtggaggtgcagctaatcatgttgttcaattatttaataatttttcaggttcaagtaatgaagatgccaatgcatatatgcaatttgaacctagaattaaaatattgttagataaaattaaacaaggtaaattgagtgatgttaatttcccaacaattggagagaatagtaataatccaaagaatgttgtacgtgaagttattgttttcatgattggtggtgttagttatgaagaggctagaattgtcaatgaatttaatttaaaaaatgatgggtttagagtagtaattggtggtacgcagactattaacagtaaacaatttatggaagagataagtgaagtatgttctggaaattaaaatacagttgttgttattactacataaaataagatgatatataaagaacgatatgtaagttagatatgatcattttgccaatcattaagtaattttgttaaagtatctaattgagacactgaatcattgtagcaatcagttaaagaattttttaatactagtacatccggtgataattcatcattattcattttaaacagattatttttaaattcttcttcattacttaaattaagttgaatatttgagacaaaatccataattgaaaatattcttcttgtcatttcattaagatttatgcgtgcacttggtatatttgctctaaaaggtttatcatcagatttatcgacttgaattttatttggtgatttaaattctttcttttgattttgtttcttttgaactgaacgttttaaatctcttctattacttgtataaggtgatgtttctttctcttttacattattatcatcagtatttgaaagatcttgattttcatcatttgatgttgaacgacttgatttgaaacgtttatcctttgattttttattggtatcatttttaacattagaatctgaattcccgtcggtttcatttgtttcaacattattattagtattattttcagtatcaaaattagattttgttcttaaattacgacggaggtctctttcaaatacttcgggtccatcacttgcacttatattgacatcatcaggtgtaacattagcctcctttgcactttctaataatgcttgtttaagttgttctgcataacttaaatatgatgatcttcttctgtgtttacgtttatgaccatcatcgtgatcatcatcttcattattatttttactggtattagcatcggtatcctttaaatcgattgaatgatcagctgaagtattatttattgacttattctcttcattattactcagattatcactttcgtttttaacaatattgttatttttattatcatcatttgaaagattatcatcttctttaacaaatctaccattttttctctttatgccccttctatgattatcatgatgattatcatgaggatttaatggatcatatttactccttcgagtattaaatttatcagtaaataaagtatgaaattgaggtttacattgttcacaccaatatttttcaggtgcattatcttcatccttaattccaacacaataaccatgttgccaaactgaacatttttcacattgaataaagaaacctggatcaacattttgaaaatctgaattactcttcttaggtatttgtaaatcaatactaccacagatacaacgagttatttcctcttcctcttcttcttcctcatctgcatcttcttcatctatcaatgcatctccctcatcttccaacatatttgcattcctactagattcggatttacttttattacccctagtagtagtaacagattgttttgagtcaataacgggatcattaagatccaattctgtatagtcctcggagtatttcggatgattggtggatcttcttgatcttctagacgacattgtcttcaaaactccacaacaagatggttatcttgattgaataaaactattattcacctaatcaatcatacagtataaaaaaacttaaaaatatgcttaatcgacgcggattctttgcgtcggtgtatttgttatattaacaattgaatgggagttcctatacctatattggaatagacactgattgttctagaggtatagacaatagacaatataatgagtggatacggagaacctaagagaagaagagttataacacatagaggaagaggaggggagagtcgtagagatacaggacgtgttgagaaacctgcaattacacaacaaattatagtagagaaaccaaaattagagaaaccagcatggatgacagatgcacaatatgaaaaaacacaacaatcacttggtttagctgttagtaaggtttccactattacaactgatgataaagagaatgaggcaaataatgggaatgatacaaatttaatggcaagtgaagatttaaatgttaagatgaaatatttgaaaaatattaaggatgaaggtaaggatgaaattgttagaaatttctataatacacaaacacatacatcaaggaaaagtaagagaactgaatctaagatttatcaattaagatcatttaataattgtattaaatatattttaattaataaatatggtaaacatgatggtacaattttagaattaggttgtggtaaaggtggtgatttagctaaatgggagatgattaatacacgacagtatgttggagttgatattagtgatgaaagtattcgtgaagcaattaagagatattgtaatggacaaaaaagtggtagatttgaatttggtgcagtatttgcaacgggtgatgcatttaaaactgaattaccacaaattttagagaatttttcaatggaagaggtatgtggattacaatttgataatgttagtatgcaattttgtatgcattatgcatttggtaatgagaatagtgttgaaagtatgttaacaaatgttagtcgtagtttaaaatcaggggggatgtttgttggtacaattcccaacagtgattttatttcatggaaaataaataaattagctaaaacatataaaaagggtgatacaagtgttagttgggggaattcaatttataatgttacattcccagatttagaagggtatgattttgagaagaaaaaatttaagaccccatttggaaatgtttataattattatttacaagatgcggttgataatgttccagaatatgttgtcccatttgaaacatttagaggattatgtgagaaacacggattagaattaaaatataggaaaaattttactgatatgtttgccaaagaagttggggaatttttcggacaattaccgggaccgttagttcaatcgttacagagaatagatggaagttacggtttagacggtgatgaacgagaggcggcatcattttatgtagcatttgcattccaaaaggtgtaaatattaagtacttctaaataataagaacctaattaagaaccccaaattagtcggtggaaccattaactaaggacaatatagccgtaataatgaaaaattgaaaaatattaaaaaaacggtgtatctcgcactaagagaaagtttaatttcctattgtttaaggtcttgttcctagatcttagctttgtttagtctctatattagcgtcaaatttatgtcttggtgcagggttattattattattattatatagggactttttggtgtttcctgaaaatttatttgtatcttcaacttttatttcttcaacttttattgactctcttctttctttggacaatgccttcactagtatcaggtcctttcaatattcatcacggtgtcaatgtcactcatttatcacctaataatgaagaaaatcgtgtaaatgcgagtgttgttgtttgtgtctgtcgttttgatgcagaatattcaaatgaattatcatctagtcctggtgatattttcaaagtttcaagtcctgatattgttaatggttggttattagttcaatcattatctactggacagaaaggttgggttcctcatcataatcttactccttatgatgttttctctgataaaaaaaacaataataatgaaaaaaagggacctccattaccttattataatgagacacctagagcaactcttatgaccccatctctctctgcaaatactcgtgaatcctctttatcttcaaattctcttctagattattatactaatgatgcatcttcatcaatatcttcaattatttcatcaaatcaaaattcaccttatacttcactatatgttcattcaatgttttctgtcaatgcatctttttgttatagaatagatttatcaacttcaactactagtactttccatattgctcgttattacagtgatattaaaactcttcattcatatttaagttcaattattttcagtatgaatgcatcaaattcctctaattcatcctcttcttatacatctacatcattttcatcatcttcacattcttcctcatctagttctaaattgaacttacctacacttccaaatccaataatgttagatccttaccattctgttgaaaatctgtcagaaagtatatctatgatgaataattatttacagaaagtatttaaaatgttcaataatacatcaaaccaatcacttcattcagctttagccttatttctcacaccatcgggtaatgatttccaacattatgctgaactttcagatgaacaaatttggaagattttaaaacctaatgaaaggaaaacaagttctagttctagttctaattcaaattcttataaaagtattgaattaactgatcttaaatctgattctccattaccttcaccagattcttatctctcaccgagatcgttctctttctctaaaccaagtattaaaaaatcttcaagtatgatgtcaattaattcaaaaatttcaaatacttcaacaatgaattcctcaacaactctgtcaactaatcaaaatagaagttcatcaacttcaacaactcttacaaattcttcaattcgtgttaaaattacatataaggatgaatactctctgttaaaattagatttagcaaatctttcatttaatgttctatcagatgcaatttctagtaaaattaaacatactggtccattgacatttgcttataaaaatgaaaataatattttcgtacttttacgtgatgatataggtttaaataaagctttagcttgtaataacaaaaaaatggttattaaagttatttgaaccgtaataatatatacaataaacataatttcctgctcttgcttttgctttctttcttttcaataatctataatttatctcttgcttttatatatcaccaatgtgtacaatataccaaaatctatttagttacgaaaattgcgagaggtttgaaaattgcgagatccactgtcaaccttaatttttttcattttgttctcagatttgaccagatcttcagactcttttgaatgtaacagtctcttcttattcaacaatgaaaacatcaattacatacttacttttactagctttacaaattgcatttactaatgctttaacatgggaattttcagcaaaaaatatttattctggaacaactatacccctttcaaccattaacattgaaaataaaattagttttgaacttttagaaataccagaagaatttaccaacaataatgaactggattggtgtttatcattgaaaaccgaggatgaaaaaaagtttaattgttttgtatttcttgataaactaaactttcgtagctctaaaatcacaggtatgttatcatttataattgatgaaaataagttaattactgatgtaacttatttcaagaataataaagaattgagtttgaaaatatccaaaccctatgagattccatatccacaattagcgttcaattctcaagcaggtgctccattgaccactcatgttgaaattgaagatgaagaagaattagatgaatttgatgaatcacctggtgaaaataataatgttgaaaatactgacaataatgatgatgatgaatttcaagaaattgttcgtccaaatagactctattctggtaacaagacctttattgaacaatactggatgtacatcataccaccaatccttttattcatggcaatgtccaccttcggtaaaagtgatccatccacttcccaattaggaaactaagtttttcccaaaaagaaaaaaattcaaaaacaaggcaaatcattcaaatctgctatatttattccatggatgtattatgtatttcttctattgaaacagaaaacattgcttgatttaaacttactgttatgatattaaagtatatgaggtttagacttgtactttttttaattatttcaattttatcaaaatgtgaaagtcgtggtataacttcaaaattaggtgcatcatgtttgtacgttgcagcaaattttacatctttcccatttgaatgtgaaatgccagatttatcatttgcatgtagatgtcaaaatcaaccttttttaggaactgttacaaattgtattgaaagtcattcaaatgatccggttgaactttcaagagcttataaacaattagttaatacatgtaaagcgcaaggtggtaaagaatggaattttatagatttagttaaagttaatgaaaatgcaacaaattatcttatggattattcacttttaccaactccaaaatttaaggcaagtttagtttggaaagcacaaaaaattcaaaaaattcaaaataaaaataaccttctcttaaacagtaataatgataataatgataataataattacattaatgatgttgtctcttctagtaatgttgtttttgatccgtatgctggttctcatgatataaatattttatcatccaaaaatgatggtatgattaagaatggtaaagttataggaattgaaaaaataccaaattttgataatattgatgaaattgaaaaaatcggtatttctaatattcttgatactccaagatacattttgcgtaatccagtgattgttcctgatgaattatacaatatttctcataatagtgtttcaaaattattagatcaaagaaatttagcaactgtgtatggtggttatatttatttatattggggatgtgttatgcttatttcaatgttggtaaatattagtcagtggtgttccccttattatagtaatagaattgctaaaacaggatttgcattatggtgtaaaagtaaaattatttgtccacaaatatttaaaccaagtaatgttttgaaatatagatctaattcaattgctaataaaactttaaatgaattagttgatggtcctatgggattatttgattctagaaatagaattaaaactcaaaatacacaaaccaaattattaagtgctgatattttcgattcaaataataattccaaacttgatcaattgagtaagaaattgaaacttttaaagaaatcaaataaggatcaaaataataacttaaattccaaaattaacagaaattgtaaagaaaactttttaacttcagtttatactatgccagttagaatgcatgcaattataattttaggttatattgttttgaatgttgttttctgttgtattgaatatgaaattgtttaccctaatactgttttcacttgtaaaaaaggtcaaaagtttgtttcaattgctgatagaacgggtattattgcaactgttcaattaccattggtttatttgttttcaacaagaaataatattttctctaaattaacaggtttatcatatagatcatttcaaatgtttcataagtggacttcgagagttgtatttgtattattagtattacattgttcattttatcttatgtttgttaatgttagaggtgattatatcgatagatgggggcttatgaagtggagatgtgcaaatactgcatttattgcaatttgtattacaatggctatttcatttggtagaaagtttctatatgaatttttcaaagttacacatcaattattattaattatattttcagtttgctcatggtatcattgtcttacacttggatggattgaatatttaggtgttgcatatgctatttgggggttagaatatttgattagagtaagtaaaataattgcaagtggttctattttgaaaggtaaatgtaagattatttatagtactgctgcatctgatgggaatggaagtgggactgaaaaaacggttcaatcaattagaattgaaattaatcattcaggatggtggaaaccatatcctggatgttattgttgggttaaatttttaaggtttaatatgttttgggaagcacatccatttacagttgttagtgctacaaatgctaaaaattataatcaacttgtttttgttattagagttaaagatggaattaccaaaaagttagccaatcatattagtaaacaaccaaatggagaatgttcacttaatttattagttgagggtccatatggtaataatattccatttaaacaatatgataaaagtattttaattgctggaggtgttggatttgcagttatttattcaattacaatggatttatgtcaaatctatagagcacaaatgttaagaggtaaaaggaatggggatgattttgaaaattccaacaagaattcaagaaaattaatatcacttatttgggttataccagattttgaaagtctaatgtcattcaaaaatgaaattgagagtttaagtaattattctgatgttatggaagttcaaatatttataaccaagagattaaagaatgaaataatgcaaagattaatcgagaagaagaaattagttaatccattgagtattttatgtggatcatatacttatggtggtatgaaaggattagccaatgcgattatagaaagtagtaggattgaagaggaagaaggagaaggagagactacagaaatggaagatcattgtgaggaagaaaaacttgatttaaatagtaatattgaaagagtcattgttaatgagaagagtaattcaagtgatttagagagatgtttagatgatgtacaagtagatcaattacgtgaagagattaaaatgcttgaatggttaataaataataataacaaggaaattaatattaattttgaggataaaccatttatgcaagatgaattatgtgaattcattcgaaatgattatgatgataagccaattgccttaattgcatgtggaccaactaatttaaatgttgatgtaagattaagtgcagttaaatgtttagagaacggcatttgtgttgattattatgaggaagagttattatggtgaagaagattacgtaacttttttgattgtaataattataattgattgggaaaatgtctatactaagtgtttttaagtgtataaatgattcttttcttttagtaatattaaacatgagtaagagtgttaagagtacgaaagtaaagggaggtgataagagattagaacaaattggagatgatatttggaagaatcgtacaactaagatcaataatgaattatttacaatgacatatggatcaattgttggacaaatttgtagagaggaaaattataattataataaagttaatgaaattttatttaatatgggatataatattggaaatagattaattgaagaatttttaagtatttcattaattgagagatgtaataattttaaggaaactgcagaagttataagtaagattggatttcgaatgtttttaaatatttcaccaattataagtaattggagtattgatgaacaaacatttcagttaacatttgaagaaaatccattagctgaatttgttgaattacctgatgaatatgatgaagaagaagaaaataattcaagtagtaatataaagggtaatgctcgtggagaattatggtattcaaatatattatgtggtgtattaaagggatgtttagagatggtacaattagaatgtgaagtttggtttgttagtgatgttttacgtggtgatgataatacatcaattaaagttagattaattaatattttaagagatgaaatacctgtaggtgatgattaaataaatttataagaataaattaaaagagaactaaaaattatgtatgaatcagagattatcggtttatctttcttaacctttcggctgtcaggtaatgtagataaggaaacgattaaatcatcattttcatgtagatagaagagaaagaagaagtagtaaacgtaggttaaaaattaaatagtatgtgcacttggtatagtgaaaaatattatgtgaggctttgagggtagtgtgtagggttttatgttaatgcctataggattattgttgagtaaaagcatgagtgcagtacaggaacatcgtatagagaatgaagaacatgaggatgaacatagcatagagagtggagaacgtcaggggagtggagaaagtataccgaatgatgaacacttagatcatgaaacagacgaacatggtgaacatggtgatgatgaggaggatgaggatgaggaatatggaatggattttaatgaatatgaaggagatagtgatataagtgaaggtagtgaaagtggtgatagtgatgaaggattagttgtaccagatatgggtattacaagtgcaccaagtatggcatcaagagttagtggagagagtgatattttcggtcctgaagaaattgaaagtattggagatgatgaagaaagtgttgatgataaaagaggtgaatttgtgtcgaatgcaaggtatgaagaaagtataattgatggagatatgttttcatttgttgaaaatgatgataaaagatatgaaattggttatgaaggtggagatactgaagtagaagagggtgaattgactgaggaagaatattatacggagactgaaggtagtgaaggtacagatattggtgaggtggataatacagatacagaaactgagatggctacaaggattgatacagaaacggggactgatgcagatgaaacgaaggaattggattctagttttgatatgagtaaagatattgaagttgatagtaaaataagtaataacacagaagatgataccagtactaaaatagacacagttgatattccaattattgataaggaaattaagaaagaaattaaatctacaaaagttaatgaaattgatatagttaaacttttgaaaagtaataataagaataaattagataaattaaaggcaatacaagaggaattaaataatgttgatacaggacttgatgaatggttaaaatttaatatgggtaatagttcaagtgttgtagaagaagataaaattggagttcatgtacgagaagctttaaaaatgcttgaagagggtacattacatggtaaaaatacaccacttggaagttcattaggtacatttggagataatattggtagtgttgcacaaggattacatgatattggacttaaaagtaaaagtaaaattggagtacgtggaaggacattgttacgtaaattaagaaaacctttataataatggtataatggtatgatggtatggtgatatggtgatatataatacaaactttcccataattaaatttatttacttacttacttatatacatataccgatatttgtataaatatcataaaactaaaaacttaatgttttatagcactttttctaattgctagatctaattgatttctaatttgtatacaaccttcagtacctaaattaatcattttttgtaatttatccaaaggagttttagattccattaataaaaggttaattttagaatttgatatagtaccaattgtaagataaggtaaatcaatttcttcaattgcattacaatcaattaaaggtgaaatatcatgaataccaacagttatagctgtaacagtatcatataatgcaatacctgcatcaactaaagcagcagttgctgaattaacacaagctgcaagtattgaaccatcagcacttaatatagttaatttaatattaatatttgtacgaggataagctttttgaacaattgattgaagtaaagttctttgaaccattaaagataattcagcaaatcgacgatcatttttggaaacttgaacacgatcacttttagcataaggaggttgaataattgaaactgataatgaaagacctgaatcattactatcagttggacctcttaataatgataaaacttttgtattacccattgaacaaattgctgaaccatcagctgcatgtggatgagtatttaattctaaactaaaatttcgctgttcattacaacgacgaccatcataacgaaatccttcaggtgatagtaactcttgatgtgacattgcctgtaaaagagaagataccaaattaaatttcagtgaaaaaaacttttcttcttttctatatcaaatctcttctaacaatcatgtacagcactgccacattaactactaagagcataatgaaaagcaccgccaccccactgacattaattgccatcatactgcggctgaggaaaaacgtgttgtttacgtaatagtttctaaaagacattgtggcggtgcatgtggcggtggctgccaatattgttgttataatggaataaactctgttagatgattggacggtcgacgcagctgcaaatagagccattcctgcaattaatattgatgttgcagtacgtattgacgctaaaagtgatcgttcattggcaagttgatctctagtctgtgaatctctattatcaaattgtggggcaaggtatttgactatgattgttgatataattgttaaattgaattttatattgtcaatgatactatttgtaccatacattgtgctcattttattggatttggttgtgtatgcttttagattattatcaagaaagaaaaatgtgtgattaattaattagattagattatcatatattttgtttcattattttgcattgtctattactttattattattacctctgtttctttatagctttccttatattatactattattatatcctctattattatattctatcctcaaatcaattaatcttaatgtccgatactgaattatctaataaaactactattcaagctgatcctatcaccgctgctgaatctacaactgttccatctgaacctgcaattcctgatactacaccagatactcctcaattaccactacaagatgttttcccggatattgatgtaaaatatattaaaatggcattaattgcatctgatggtgatcttcaaaatgcaacaaatgctttattattcctatctgatccaacttcagatatcccaattccatctccaaaggttatacaagaacctccagtttcaacttcaatttctagttcaactccagttgaaagaagaagatcatctacacgtcatatcccacattcaactacaagagtccgttcatcaaattcatctcaaagacaagttaatacttatttagatagggaagattctgatgatgatttatacaatgtattaactaaaaatgttaatgaagcaaaacaaacagtttcttcatggtttaataatgtttcaaaatcttttgatacaactataaataataataacaataataataacaataataataattataataataattatacttcatataaaacaaatcgtcaaccatttcaatcacttcgttcaaatgctcctcatactgaatattctgataattctgattataaccctcctttaccttcaagacctaatgaaaatactccaaaattacctcgtcgtccattatattctgctgtaaatcattcaaatggttcattaattaatgattcaaatgatgataaagaaattgaatctaaattaaaatcaactacaatttcaaataaaaccactaaaccaattactatgaccgaacttgaacctgaacctgaatctatatctacttccaaatcaaaatcagaatcaaaaactgagtcaaaatcaaatgataaacctgaacttgaacgtgaaccttcaactccggaattcttagttgaagatagtgatgaagatattaatcctgatgaaattactaaataataatattattatatacctttttataaattatattttacaattttctaaatatccactaccagtataaacactaccttcccataaaattgtacgcataactttatttaaaacttcaacttgaaatgcttcatatgggaatttttcaccatcaacacttatataacattttctattcttctttggtataagtctatatgctgaaactttaaaatgttcaacacaatcttcccaaacatgtgtacctttatctaatgataataatgctttactattttgcattgccttatatcttgaatcaaatacaactaaatcaattaatccatcatttggtaatgcagctgggaagaaatttgtattacctgaaacatatggcattttacctgcataaaatatatttgcattattactaattttttcatcataaatttcccaactttcaggtaaattatttatattagcattattttgaaattcttcattatattttaatttaaaatcttcttgagttaattccctatcttcaatatctttaacattctcaaaatgtttaataatttcagaattatccctacaaaccattttaactgctaaatcaaatggatatttcctattatttaaaacttcatatgcaacacctaaatcaaatcttatactaccaatacttctaatccattcagtaccaatatcagcttgtgcaattgcaccataagtttgtgataaaaatgataaaataatttcattacttgattctttactaattgccattaaatcaatttgacttgatttaccctttaaagctcttaaaattgctaatgatgaacttgttgctcctaaacatgataatgacattgcattacctgatcctccaggtatttgaactatatttattttactaaatgctttacatttatcttcacgtttataaaatccattaataacttcatatggtataccatccccagatgcacataaaatcatatcatatttatcaatatcaatattttctgcaatatctgttgcatgtccactatattcagtatgttgaactgtaacttcacaatgactaccaattataataggttttgcttgttcattatatattttaacagcttctcccttaccactatgaggattaattaaaacataaattctaggtcttttcttactgaaaggatatgataatgacataatttttccaataatatcatcaatggcttcaatatcattctcattttcactatcactgatttttaatgttatattttttggtatatattcacgttttgcatcttcataaggtaattgaaattctagtgattgattttcagttaaattcattttaccatcaattggatatgcaaatgtaatttcaatttctccattcattattgatgttgccttttcaacatgtaaaatatttataaatggtataaaattattaccactgtttacattaaaatttgatgtccttgtagaaagtggaactgaaagacaacatccaatagatgatgaattatcattttcataagcatttaatgttaatggttgaccatatagtctaatacctcccttttcaatatctatttctcctctcattgtctaaagaagtttaaagaaagaaagagacatagagttaagatccacgaaaaataaagacaaggggctaacagttttactatacgttatctctctattataacggttcaaaaaaagtagaaaaatattctaataaagttataatataaaaatttaacgtcagctacaggattcgaacctgtgcgggcagagcccaaaagatttcaagtctttctccttaaccactcggacaaactgacactttttatttttactttgcttttgactttctgcatcatacttttgcacgtgacttccggtttttaaacggtaatatctcaatatttactaaacattttaaggttttatttacatcattttaaagcttaaaaagtaaacttttattgattccaatcttgtctttatagaaaagaaaaaaagttttctatgatttgattggaaagttgcaactaaacacaagttttttcaaatcaatttcaaaaagctatttacaactactttttaaatacttcaaataatcagttgaatctattttattaacttacaaagatacaaaaactgaaaaaaatcttaatttccagttatacgttcaacaatcaatgttacactatcacaatatttcttcccttttaatgggaaaccacgtaaaccatccatatcattccaagaaatgattaattctttctcatttttaccttctttatgctcaataaactccatatctaaatttaaactgaatgtaacaaatgatcttggaatgtatcttttaatacacattatttcaacacatatatcacttgtaacttcctcagaatctatttcataaacattattaattttggtatctgcagtaatatgaaatttgacagctgtattcattgtaatattaccaattttaatttgaaataagtttccacttgttgaagatctatcattgattttaacacttttgataagaaatttagtagtttgggatgtgaatgttttaaaatcattctctcccatagtatgaacttcttcccaatatttaatatatcttagttgtgactcaactgtgacagcattattatatacatatctcttctgagagaaaaattcattagcttctctagcattaatttgatatatagacattaatacaacacaagttaaggtacctgttctacctttcccatgcttacaatgaataaaaacaccattttgacctttacttaaatcaattggtttatttaaaaattctttaacaaaataagccaattcgattaaagtatttaaaggaataacatgataatcaaaccaattaactttataaacttcaatattagttgaagaatgtttctcaatttcatattcatccttttcaccaacaagatcaataactaaaacattttgaaaatttttatgtaagaaatcaaatattttgttaaaggttgaattattattgaaaaagggtataaattgttgagactttggatatgaaccaacaagaagattaggtaaaatataaaaaagatctatataaggcaatgcttgctgcacttcagtatctggtaatccagtcatagagatagaaaaggagaaaatagaagagctgaaagaaccaaaagcaatactacccttgttttaagctttgcaatggctcagcaattgtcttatacaaagtttaaacgctgagccgttatcaatctttcggagttttcgatggtctcgcaatattgggaggttcggaattttcatgaatttttctcgcaacatgtacattttcatttcaacaatattatatcggtacaatcagaaaaatagtaatggtaatacgatgacacgaaatgttcgatgataaggatatggaaataataaccatgacatcaagaaatctatgaaacaagaggcttttgtttcagaaaccaatctttagattggaaacgtgctaataattcaaaaactaagatccaagattgcacgtaaatcactgagtatctacgggaacgtatagctagctatttaattttttttatccttttagaatacttctaaagtttctgccataattataaaacaatcattaaaataagaaatacaaggggtaaagaagtaaacaccgataattcatgcggagaatgtaaatatttttaccattttgggatagcaaagggaaatttcaattcagaggtaactttttctggtgaaaataacaattaaattgaaaagatgatgagaaattatttcattaacaataaactttaatctttaaattctgatgtcagatgaataaaaaattgcaaattacgaaaaaaattattgaaaaattactacatcgagacatcaaaggaaccatttctaacaacatttccaatttaggaagtttaattggatatattgttatttatcaattaattaattatgaagtatgaaacagttgatttaaaagaattttactatgttcaatcgtttcaaaaatttatgaaacattgatttcatgataatatcataaaacttttcattaatttaatagtttatcaactagttctgaaaactacttaagaagttgatatcctacaagtttttgatacatcatgagttcttgctaatattcctttatcatcaaacaatcaaacaaaacaaccaaagaacattcttttaacaatgcaattctcaacttcaagtttattatcaataattatggcagtttccactatggctgcaccaattgctcaacctgaagcaaatgcaaatgctaatgcagttgctaatgctgacgctgatgcttggagatggcacgtttggtttagaaaccaacctatctacaagagagaagccgatgctgatgcaaatgcagttgcaaatgcagatgcttggagatggcacgtatggtttagaaatcaagcaatttacaaaagagaagctaatgcagatgcagatgctgacgctgatgcttggagatggcacgtttggttcagaaaccaagcaatttacaagagagaaactggtgctgatgaagatgatgaaacttctggtgctgatggtgttgtccttcaatctgaaactgctgatgaagaagaaccacttggtgttgcttatgctttctcagatgattccgatgatgctgaaccaattgctttctacccaatttatgcaagtgacatggaatctcaattagaagatgcacaatcctcaaattcaactgaaactgattcattaaccaaaagagaagctgatgctgatgctgatgcatggagatggcacgtctggtttagaaaccaagcaatttacaagagagatgctggcgcagatgcagatgctaacccagatgcttggagatggcacgtctggttcagaaaccaagctatctataaaagagaagctgaagctgatgcagatgcagatgcttggagatggcatgtctggttcagaaaccaagctatctactaattatttagttggttttgaaccttaaattatcttatttcaatctttttccccttatctttttataccgttcttttgatatcaaacctacttatttactattttaaattatatataacctagttaattcaatcattataagtaactaaatcctattaatccagtaaaatttcaaatctcttaatatataactaatcctgatcaatgaatatattatttaccagccacaattttcaaaaatatttaaaaatatggcggtgccaaactgttcaattacatcgattatacctcttttactagataattatatagtaatgtatcaatattaattttttaaagtctataaaataattttatttaaagtaaacaatcttatgcaagtaaatgttctaaggattcacccataagttcttccataatctttgctaaaccttcacgaacttccttttgaacatcatcatcatcatcttctaataattctgcaacaattggaacaagttgtggtaataaacttaaccaagtttcaccaatacgtttgtaaattgttgtaagtgctttaattgaccagtatttttctcttgctaacggttctctatcaccaataacacgcatatgagaaacaattaaatcatttaattctttattatgatcatctgatgaggaaatatcttgtgctaatgcacataatgatttaaccaagaatttaccaatagggaattcaatatttgtaagttgtgcagtaagagctttggaaattgagctgaatcttgaagaaacttgccagtactcagtttgatcatatttgaatgatgatgttaatgacataataaccaatctacgaagagagatattttctaatgcaccagttgagaatttttcaagtaatgcaacagtggaatcaagaatgtaactatagtatgtggtaacaattgatcttaagttttcttgtaatttattgaagaatttatagaatgattctaatctttcaacttcagagatatcagttaggacaccttcaccatcaaatgcccatctaacaaccatacctaataatggtctaaatgtcttatcattcaacttcataacatatgcaatagcacatgagtgaatcattgattcaactctaccaatagtatttttatcaaatttagatacagcacgatattctaatgagttggttaagaatttgaagaataaagtagattcatagacagcagctgatttagtcatattttcaacagtattttgcatagaaccaataaatagacctaaagcagtagcatctaaagttgaagtaaattcccaaagtgagcataatgaagagagaacaattttagcatcaacatattcaacaatgatatcaaaaacatttgatctaacagaatctgaaactgcacgagctcttaacaaaacctttaaaatatctttaatatttggagttaaaaagtttggaatctttttaattaaagctgaaaagaagacaacaattgaaacttgaattaatcttgatgattcttgattactttctgcacatttattgaaaatttcaaaaactggaggaacaatcttagggaataaacctatcattttaacaccaacaataacaacaatacttgtaatacaattgattgaagaaatagttaattctggagattcaccattagttaaaccacaatcaccaatgataacacttaaaaatttgattaatttagctggttcaatattttctgcaaatctgtggaatagtgttgccatagtatctaaacaagcttgtgataattcaacatcaacctttgattggattttttctaatagagttggcatcaataatgaaatactttcaaatgcatatggattttcagtatgttcaagagaaaatttagaagcagtaagtgaaataaggtttttcatagtctttaatgaagtatctgatgatttcaaaatttcattaacagatttggaatagtattcaattggtaataaacttaaaacatcacctaataacctgtaaaacttattgataatttcagcatcttcagaattggagtttgaaatatcaataacttccaataagtatttaacaatttcagagaaactagctaatagatcttcagtatttctatcttgtaaaatttgagatgcaattttcaatcttaatttaggaatagaattagtactctttgaatctgtgagtgcatgtctaataaatgaaattaaaccctttcttaaattatatagagcacctttattcattgaaactatacttggaccaaaaataactctagatgataaatctttgtatacttgggaatctttttcaactggcttatcaggaatacatttccataaatctaaaaatttctttgcagcatctaattcttcctttgcagagaaaacttgtaagaacatagtagcaaaatcaaccaaagctgaacaatcacccatcttatgcttcatataagcattgacatattgttgaccacataagaataaaattaagtgaatagaaagttcactacctaaagttttagctaacgaagtaaataaacgaacacgtctatgtcttggaacatgaataaatgcactaacaaatgaagcaagtaaaaattcaatttcatcaattttaccatattgagcagcattagctaatgctggaacaacacaagtaattgtttgttcaacaacatgaccagaaaattcatcatcttgacgaatagtatgagcacccataaatgtgaaaattggcataacagaatgtaaaactaattcaggtgataatgaagcaagagcagcaataactaataataatttattttgaacttgtggagaatctgaagctctaatagcagaaacaataacatcagcacgaataatagatggatcctttaatggtgtattagaatcctttaatttttcaataatattctttaaacatgatgcaatagtttcttgtgcatataaaattggtaatttaccatctttacccaaagtttctaaatcatcaagaataatgaaaataatctttaataattcaaaggaaggttcaaaatctggttttctactaaaaaaatcagtaacttcaattaacatagtaaccttctttaaatgtgatgatgcgatatcagagatctcatcatccttcatagcttgtctggttgtttgagatgatcttcttcttctctttggaaggttagatgggtttggttgtgttgtagtatttaatgtacaattcttgagtaattcaatgaaaattgcatcagtcatattgattgattctaaaacttcaactggatcataattgacaaaattatcagataaatattcttcaagaataaaattaattattttagtttgatgatcaaattttaaagttgagataatttcaataatacgatttttagctaataatgataaactctcatatggggaaactaaagcagcttctaaaaatgcaatagcagaatcattcttttccttagctgaaactaatgaaataacggttgattcaaaagctgataaatcacaaccagtttgagtacatttggttgcccattgtggtctttcttggatataagaactaataaattcctcaaataaaattgaaggagcagctgcacctttaacatgatttgcattgtatattgaaattttcacaagatccattttaatacttggaatattaacatataaagcatgtgaggcaaaaaatgcaaggtataatttacctaattttttatttgaaagtaatgattctaaacaattgaaaagtgcagtattatcaactaagaaattagaagccatgttatttaaagtttctaaaagtgaaactgtatcctttggagaaataagagcaatcttgtcagaattatttccataaataacatcagataataaaattgatttaggggatgtattatcttttgaaactgaatataaaacttcgattaattcatttgcctttcttctaatactttggttatcatcaattaacaaggtaataacaattggtacaacagaaccaacaaatacctcagagtttaattctttaaaagcattaattaagttgctgatggataaaaatctagatttaacaggtgcatctgatgttgctattcttaataaaaatgaaatcctaacatcgatattctttaaacaagttgaaaggaaaacatcagttgatttatttataatactcttgagatatgaaccttgaagtgaaaggaaagtttctgttgtttctgtttcatctgagaggaatgatgcaacagtgatattttcattttgcttatatgattcagataattcctcatccaatttagtaagatcaacttcttcatcaatagcaacaatttcatcatcatcatttccatcatctaaaatagtatcatcaataagtttactttgtgcaataacttcaagatcagaaagggtagtatttaatgactctaaagtagataaaaataattctttattagtttcaattgcaaatttcaacaattgaacatatgaagccttagattctttaatgattgcttttaccaaatcagataataacaaaacaatttgggtttcagtgaagtttactttgtttttcttaattgaatcaacaactgaactatcaatatcaatatcatatgcaattaaacttcttaaataaacagttgtaaattttccaatgttattagatgaggataaaacttttgagtatggaactgaatcattgtaaatatttgaaggtaaactatttaagatttgtttagttaaaggttccaaacctttatcttgaactgattgaataagtttgacagtacaactgaaagcactaactaatgttttctctgatgcagatgataaaatagtttgaattgaagcaaaaacaattgatctattaagtggaacagcagctgaaataacaatcaagatagtgtaagcaccgagtttacaatcatcatttgcagagaccaataaagtactaacagcttctaaagcatgtggaacaatattttttaatttttcagaagttgttgaagataatgcagctaatgatgctattgtcattgaagtgtaaaacattaaacatttattgaagattgttttattacgaacttcactttgaataaattgggaatatagattgtaaaattcaacttcagtgaaaactttaataattgaattctttgatggattcttattggattttttgaaattaacagcccaagagaataattttggtaaatctgaaataacgtacattatacgtaagaaaacttgttgatcaaaataagggagtgttgataagattaaatattctgcattatagatattcatttggaatcttctcaatggccattctgccgctctaacagaaatagctaaatgccaataaggagctaataaagataagaattgattgattgatttatctaaattatcattttcttctttactttgaacttgtctatcgatttggatggatgtaagactaaagattgtatgtttaaatttagaaaaacgtttatctaattgttgaagacgttcaaatgcctccaatgaatcataataaattgattcaaaatcttcagttgcagcaaatattggatcatgtaagaaagaaattgaatgaattttggatcttttctttctatccaaagtaaccgctttagtacgttcagcaataccagccaactggtctgcaagagaggtcatatttgtgagcaattagggttgttctattaaagagtttgaaaaggatatttaataaaggtttaaaaatattttttttaaggtgaaataaaatgaaaatttttttaaagattgaaaaattcggaaaaagtttgaaatttccgaaatatttgaaatttgcgaggtcatcacgtataagtatgtccaatgattagtatagatagagatagcaatgaagaagtaggttgattatatagaagaagagaaataagagctcattgaactcttttaaacataacgataccaatacatggttctaattcaggataattttcaggaattttagcagtaataataatatcaggttcattacgactttgctttaagacatttgtaaattgtttaacaagttctaattgtctattaccagcaccatgatcttccatatcactaaaatctttccatggatctaatgcatcaatttcaggtataccagttttagccattttaactaaatcaattctgtattctccagtttctggtaatttatataaacttaatttatgcattcgacgatctctatcagtatctaatggactattactattaggatcaatatcttcatctaataggaaatctcttttagagttataaaaaatttctgcatctgttatctctaatgctgcaagattaaacattgtacctataccgaaaaatggtgtttctttgatatgtaataataaagttgcaaatcccgatggtgtattaccaacactgattgcacaattgttcatatatcggaatgttttctcagttaatggttcaggtatttctggtattgctggaacaatatttgtatcatttcctgctgctatactgcctaattcattttccatcatggaatatgaaaaatcagtctgattgtttgagcataaattcggtgggccgttcattatgcgtatgtgatatagtgtataatacttcacacggatacagttctaaagaagatggatctgtaaagacagaccctttaaaaagctttactttatgataccattttcttatggttgattacgtaattttttacattcatattcctctatttccatctaatattacaattataaagtaaagatcgatacaaagatttacaaccactaatcataaatttgtattggtggaattttatctgccttatagttccaatttaacccttcaacttcttttttaagccatgtagtagggaacaaaacaatattacccttaattaatttaagcaactttaaactactatcgtaatcataaacaccttgtttaccaacattattattagcttgtccaccaattctttgatatctctcaagctcagccaatttagccgatctttccagtctacgacgacgttgttccacatcatcaatactttcaccaccaatactttcacctaatgtttcattatcaatattatcaacatcaccacttgtattttcatcaactgtatgacttcttgatgatttttgatacaattcaaaagcttccttcattttttcgaattctttataatcagtccatgtttgtacactatcatcaggttgtacatggaaaatcatttgatataatgatgtatttctaattgcttgtgttaaccacgtaccttcataaaatttgatatctaatggatcttcaaatccatatggatcaataaattcaaaatcaactggtggtaatatatttttatcaatatctgcaacattctcatcattaagttgaactaatggtatatccatattagctaattttctgtttttcctactatttgatgaaataggtgggaaaggtgaagaagaagatgattccattgatgatgtagctgaattttcatttatacgattggatgaatcttgttgatccggagaaactcctttgtttccagtcaccgttgaagctgatttatagttggtaggattagtatgatcaacagattttgaaccttccgcaacaacttcatcatctcttgaacttccggtacttttattataatcagatgtagttctagaagtattactagcagtaccaaaactttcacctttgccattatcaccctttctttctaacaacattttactgtataattttttaaggtaaaaaagtcttttaatcattgtccatctgtcaacattaataacattttgttcactaatattaactttagattcttcaactggcttttgagctaaaacttcaagaatatcctcataatcaggtaataagctggattttgtattaaaccagttcccttcattatttgcatcatcaatatcagctttgatttggttgatcttctccagtaaaaatctattaatttgaactttggcttctttataagaatttgaattgaaaccatcatattcacctctgacttcgtttctgtgattttcatttttgatacgtgtatcagatgataaatttttagcactacgaataccaacattttcaacaccagcacgatgattgaatgaaaatgaaaactcaagatcatcaagtgatttagaattatcacttttattttgaatattggagaaattagatatcatagattgtgtgagtgtttccttaaattcatcgttttcacaaactttattaaactctactgtaccttcacttaagcctaataaatatcttgtacctaattcaaccatggcacttaaactttgagatccttcattgggcttcaatactgatgcgttaagaccttccttagtatgacagaaattttcaatttctttgaatctacgttcaacaagatcaattaaatcaacatcaacacccaaatgttctcgcatcaaacgaactcttaaactatgagcaaatttaccaacgtgatatgtttgaccatccattttggattcaataaggtccttgtctctaacaattgcacaaacttcagaatctcttgaaccacgcattgatctttcattaatattagcactaccaataattgcaatacgatcatcaacaaccattgttttagcatgaatatataattgttctgtagttaataattgactaggaccaatcttaccccattttcttaaagaaaaaaatgtaatataatcttcaggtctaataccaacacgacgtaatcttgaaaaaattgaagtttcacccattgaaattgacatatattgacattgcataattaatctaacactaccaccttctttagtatcaacatctgcttcaaatcctggcattaatggaataacaataactgctttccaaatttcaccgtttttatgtgctgttataattctatcaactaatgcatcaccaatcttatttttgacaaatgtattatcaattttacaacttgtaacaaaaaattgattttccatataaacgaaatgttcactttgttcaatacacttaatatatgcattttgaatactctgttcatgttcctttaaccctaacgaccattctccacttgatcttaataattgaacttcacaattacccttcaattctaattgttccaactctttatcagtaaacggtctaggtggaactaataacggtgtaggacgagaaggtctcttttgtcttaataaataattccatctttgaatgaaatgtcttgccaaatcccttgcaacttgaccagaagttaacatatgaacatcatgccatggcatacgtggaacactctctctgtcatacatatcatcatgaggtaaagctaattcaaagaaatctttcttacgaggattagaataatctttaccggggaaaatttgaaattcttgttgaaagtcatattgattagtggtagttggactatctttggtagttggagtatcaattttttctggaatttctggagagactggcgtagattctaaatggactggtttttcattttcttttatggtatttccagcattatatgaattattagtagatgagggtgaggcagaatctaacaatgtatcagaatttgaaacgtaatcagtgtttttagttttttcgaatgcatatttggaatcatcagctaaaacatgatcaggtgtatcatatctaccaaaacataaatcaatacctccaagaaatgcaagtacattatcaacaattaatagtttttcatgatgtgcccagaagaaaacgttttgaacaatttgatttggtgatctcaaaacaaaaatattttcatgtaaatctaataatgagtgcttagtatacattgagtctgtaacaacagtattcccaacatttctgtaaatgataataaagattttgacaccttgtctagcttttctttcaagcaatctatcaattctgtaatcttggttaccattggcaggtcttcttaaataaagttcgggagataaccaccaatcatgaatgtaaataacatctttggccatttcgattgcagatgatgcagcataccaataatctctggcatcaacaaaccattgagcaaatgcattatttctaataggtgcaaatgattcaaatctatgaggtttggaccattcagttccattaataatttgtttaagtgccattgcccattgtaaagttaattttggattagttgttagtaaactgatggaacgctcagaatttttcaatttgattgttggatatgacttagaattttttaacatataatttggcatttctgagtcgaaatcaatattattaaaattttcatcataatcaggattttcattcatataatcattttcaccattgttttcattaaaattatgatcatcagttatctcatttatatcaaattttttcgaaaatccttggattgtcatttttattttggaatcaattaggaaaacttcttcaggtgttgtacttacaatatctgatgtataaagaaaaaatgaatcacccaaaacacaccatttttgagtatgacgtttaaccatttcactcaaatcatggaatttaaaatgactaactctccagccttgtttactagctgaagaaacaacaaacaaataaccttcttttctctttctataaatttcattagaaagtaaaatactaaatggagataactcaaaaaattgaagcataccattagattgctctttaaatgaaaattgtttaattaaatcattaaaatatgattgaatatcatctctatattttttattaagtttcattttttcatgtatgagttgtagttccttcttttgctttaatgtcttttttaaatcagattgatcatttttgtctttctttttgtctttactttgtttgaaatttatgaaggcagctgatgacagcttagtcagtgtacgagtaactgaacgagctgagcggaatgaattgaccgaatcactgacgatggatgcatttgtgtcatctcttctaattgaaggtgtagcaattggttgtaaatcagcttcgtattgattagtattactaatattattaacaagttcatgttgatttgattctgtatgattttcatcaattgtgttcaaattattatttttatccacttgattttcattatgattatcagaatttttcgtttctttatcatatttaaacaaatctttaatttttttataatggcttggcaaaactgggaatttaggtactgaaaaatcttttggatttattttatcttgtctttctcttgaacttaactttaataacaatttatggaaatgaatcaaatgttttgaatctttttccagatcccaacgcagaacatgatcaccagcaccatattctaaatgcagtctaaatattctgttcttggaaaaagctgcaagtttcaataattcatcgttagtcagggcagataaattgtttctgcgttcattattttgggtatcattttggtttgagaacaatgcattgaatttattagtagcagtatttgtattattattgttgaatttaaatttcataaagtaaacttcctctgttatatctgaaaaatagacacttaataaaggtaacattataggtccctttttaataccatttttatctttaacgaatgaggatgttaaacataacatatcagcataacctaacagaaatgtatcaatcaggaaagcagttttttgatcattcttttcatctaaatatttctgaggatcattattcatgaaacttattgcattagttaaatgatttaaatcttccagttttatatttgtaagattagcaaaattttgatttaatgaaatattatcatttgaagttaaatttaaagtacgtaagtttaaattttcataatagtgttcaagaggagaatgtttccaagttgaatttctattcggaagagttattggttcattttcatattttagataatcaattgcgatattttcatttatcttattttccgtatcaacaatatcttcacgaaattctgaacgtatagattcaactaaatcatgaacaagatgattatccattgaagttctacttggattattaacatttaagttttcaactttatccaattgtttaatcagtttattaattgatttcatttgatcataatcaacagattctttagtacctgaatcttcaaattgatttttatttgttataactaaatttttcaaatttgatgaaattaatttaaccgtatcattaattgaaattgaaccatccatataggaaaaggcagcttgtaaaggatttaagttaggtttattatttataacttcactattttttaatcgttgtgcaattacatattctcttaattcagcatcagattttgcactatcattttgaattttatttaattgtgtatttgtacttgcaataggatccataattttactagaatgtacatcagaatttgtttgaacatttgatttctcatagggataggaatttaaatttacattagaatttgaagataatggtctttcttgagcatcataataatttgaagttgaagaaacagttgaattgactgaacttctagactgtcctcttgttaaatgccctccattagaagacattcttaattgataattgaaaagaccagtatcaaagaataaaggaatattaataaagcttgttgaaatttgaattgtaaacaataagaaaaagttaaaaagggcacttttcaattttattctttattttattttatttctttattttatttattatttcttatctcttcgtttatcaagttttcactgtttatcaagttttcactgtatatattatttaattgaagtttgttaattatatacgtaaatacatcatgtttggtagtcatgttggtacagtaatagtaatagtaatgtattaaatcttcaaagtaagtgtgatattatgcagtattatttagttttgattacgtaagtatattcatatctatacgagcgacttatataggccataagtttatgctaagtaatcatccacacggtaagatactacttagttacataaaaaaaaccatgcatgttaataatacatttaagacataaatgcttgatgatttatatcaaatatttaaaaaaatggaacttaatttttttctattagaaatgaatttttataaacaagaatataggtagtaaacagtataatatagtatgataataattttataacaatatatgatttaaaatttggtttctaaaacttttttgatttcatcaacataattaccctttatatgaatactattacttttaataaaacaagtaaattttgatttttcaatttgaggtaaagcattttgaaggtcatttcttaattgaacaacattacccttaactcttttaatatcagtatattcacattgtgaacgtatagttttataaacaggtaaattacctgaacttgtacgtgaaatattataagttggtaatgcaggttttgtagttagttgagataatgagatttcatttaatgatggaagtactttagcaagacgtgcagcagatgatgcagataaagcagacattgttgtatatgtgattaaggagtaactcaatataaatgatcaactcttcctttaatggaattccaggtaagaaattcatgttgaaggtggaaagtatagagaaaaaatttgaaaatcttaaaatattataaaacgcatagacgcgacggacgcgactattgaacaggccatattttcaatattagatttacacaactggtgataggaggaattacaataggttatttacatgtaaataaattcttcttttgaagttcgatcaacaaataccatttatatataatgggtagaccaagactaatattactgttacgacatggagaatcggaaagtaattgtgataaaaatgttaatagatatacagcaaatcataaagttcgattaacaactaaaggaatggaacaagctgaaagagcaggaaatgaattaagtgaaatgatttcatcaaatgagaatattgcattttatacatcaccatatttacgtacaagggagacaacagcgggagttttacgagggttaaaaaatactgggtggaatggtaatgttaatataattgaggaaccaagattaagggaacaagattttggtaatttccaaggtagtgaacaagaaaggagacaattatggacagagagggccaaatatggacattttttttatagattaccacagggagagagtgcagcagatgtttatgatcgttgttcatcatttaatgaaactttatggagaagaattaatttagataattgtccaccaattgttatattagttacacatggattagctgcaagagtttggttacagagatggtttagatggagtgttgaattatttgaagatttacaaaatgttaataattgtcaatggattgtacttagaaagggaaatagtgggaattcaggtgaaggttatatattagagacaccattacgacgattctcaggtggatatcttctaggtagagatggtgaagatatgaaagagttctcctatgaagatataccaacctctcgtagtaccagtcctttgttataataagtagatagattatatagattacgtaatacaatatacaatacccggagttttcgttcccgggaatgagtgatcactataatggtaaaaattatcttatgacatgttattattgttattatcaacagattggataataatgttatttaatgaacgcttttcttctggtttgttttatggctttaaatatggtggtgttttccttttctctttcacttttaatctttaaatttatatctctttagattattatttaacaaacaaaaacttataacaagttaaacaaataaatcaaacaataacaatggcaagaactttctttgttggtggtaactttaaaatgaatggatcaaaggattcaattaaaacaattgtcgataatttaaatgatgcaaaattaccagataatgttgaagttgttctctgtccacctgctgcttatcttaatttaacagctgaattaaataaacaacctaatgtctctgttggtgcacaaaattgttatttaaaagaatcaggtgcttacactggtgaaatttcacctcttgcaattaaagattgtggtgctgaatgggttattcttggtcactctgaacgtagaactattttcaatgaatctgatgaatttattgctgaaaagactaaatttgcagtagataatggtgttaaagttattctttgtattggtgaatcaattgatgaaaagaaagcaggtaaaactttagaaatttgtaaacgtgaattatcagcagttattaaaactgttacaaaggatgattggaataaaatcgttattgcttatgaaccaatttgggcaattggtactggtcttgctgcaacttctcaagatgctcaagatattcatcatgaaattcgagattatttacgttctgaaattggtgaaattgcagattctattagaatcttatatggtggttcagcaaatggtaaaaatgcaccagattttaaggataaacttgatgttgatggtttcttagttggtggtgcttcacttaaaccagaatttgttaatattattacctctagacaatagataggtaataaaagcatagcataaaatacatattttattttatttacttactaatatataatgataactgttttataatccatccatatctttattaacgaatatatccaatacatcatcaacattttcattctcatcaacattatcattatttttaccatcccttaatattctacgattaattttaattgctcgtcgttcacatttacttatactaccacttacaccaattgaatcccaaattacatttttaccatcaacacttgaaacaaaaaacatcgcaccaagtactttttcaactgcatcacaatgaactcttaaaattccaactgatgtactattagaaaaatatttaatagtaaatgcatttaatgtctctgataatccaatatcaccaaaattttttgacattgatgctcttaatattgatattagggtctttggttgaacatttttagcagttttcgtatcctcaaaatccggatatcgtagttgaaataatatatatcttgtcttaagtctaaccattgtatattatcgttattaaacactatttgatataaaaacaacctctaaaaaagagataaaaaccccatggaaagtaattttttcaaagaatcagaaaaaaaattacccagccgcccttttcgtcgcgtctttgaaaaaaatttattttttaaactttcattatcatgaaatttgaacatgaactgaacaatttcaatgtgccaataatattcggttatttacttctttccttttaaacagtggatgttaattaagagaattagaatagcacatcgtcttttctctacaacaatgtctcattacactaatcctgcaactaatccaaaagttcaagaatggcctgcttataaagtcagagaaactttccttaattattttaaagaaaagaatcataactttgttgcatcatcctcagttatccctcatgatgatccaactttattatttgctaatgctggtatgaatcaatataaaccaatctttttaggtacagttgatccttcatctcctttatccggtttaaagagagctgttaattcacaaaaatgtattagagctggtggtaaacataatgatttagaagatgttggtagagattcttatcatcatactttctttgaaatgttaggtaattggtcttttggtgattattttaaaaaagatgcaattatttattcttgggaattattaactaaagtttatggtatccctgctgatagattatatgttacatattttggtggtgatgaaaaattaggtttagaacctgatcttgaagcaaaagaattatggttagctgtcggtgttcctgatgatcatatattacctggtaatgttaaagataatttctgggaaatgggtgatcaaggtccttgtggtccatgttctgaaattcattatgatagaattggtggtagaaatgctgcttctttagttaatgaagatgatcctgatgttttagaaatttggaataatgtctttatgcaatttaatagagaacaagatggctcattaaaacctttacctgctaaacatattgatactggtttaggttttgaaagattagtctcacttttacaagatgttagatctaactatgatactgatgttttcttacctttattcttaagaattcaagaaattacaggagtcagaccttatactggtaaattcggtaaagatgatgttgatggtattgatactgcatatcgtgtcttagctgatcatgttcgtactttaacttttgcaattgctgatggtggtgttccaaataatgaaggtagaggttatgttttaagaagaattttaagaagaggtgctagatatgttagaaaatatatgaattatccaattggtaattttttttcacaattagctccaactttaatcgaacaagttaagcatattttcccagaattaaataaagatccaagtttaatttttgaaatcttagatgaagaagaagcttcattctcaagaaccttagatagaggtgaaaaattatttgaacaatatgctttaattgcttccaaaactccagaacaaaccttatcaggtaaagatgtttggagattatatgatacttatggtttcccagttgatttaactagattaatggcagaagaagcagatttaaagattgatgaagaaggttttgaaaaggcaagattagaatcaaaggaagcttcaaagggtacaaataataaatcaggtaaaactttacttaaattagacgttcacgctttagctaaattaaatgatgaaaatgttccaaaaactgatgattcatttaaatatgatacaaaggatattgatgcaaaaattttaaagatttacatcgatggtgaatttgttgattcaattgattatgaatcttcaaagggtaaacaaatcggtattttattagataaatcaccattctatgcagaacaaggtggtcaagaatttgatactggtaaaattgttattgatggtaaatctgaattccaagttgaaaatgttcaagtttatgcaggttacgttttacataccggttttattgaagagggttcatttaaaactaatgatgccgttattgcaggttatgatgaattaagaagatggccattacgtaacaaccatacaggtactcatattcttaattttgcattacgtcaagttattggtgaaggtgttgatcaaaagggttcattagttgcaccagaaaaattaagatttgatttctcccataagaaagcagttgaattaaatgaaattgctaaagttgaagacattgttaataaaactattaaggataacttgaaagtttatgcaaaacctgttggtttagaaactgctaaaggtattaatggtttgcgtgcagtttttggtgaaacttatccagatcctgtacgtgttgtttctgttggtatacccgttgaagatttattagctgatccaacaaatgaaaaatggaccaattattcaattgaattctgtggtggtactcatgttgctaagactgatgatattaaagaatttgtcattattgaagaatcaggtattgctaagggtattcgtcgtattgttgcagtttcgggttctgaagcaagagaagttcaaagaaaagcatctgaattctcaaaattattagatgaagcagataaattaccatatggtgaattaaaggaacgtaaggttaaagatcttggtactgaattaggtaaactttcaattagtgttgttgaaaaggcagaattaaagaataaattttctaaaatcgaaaaaagtgttaaagatgaaacgaaacttcgtgttaaacaagatactactagagttatggatgctgtcaaaggtttctttgcagaacctgaacattccaaagtttgttccttatatgttaaggcaaatgctaatgcaaagattgttgctgaagcaattaattatatgaagaaggaacaaaaagattcatgtctgtatttagttattggtgaatctgaaggtaaggcggcacaaggtgtctacttaaacgaaaaggctcaagaacaaattcctgctgttgatgttgcaactaaggctgctgaattcatcggtggtagagcaggtggtaagggtaactcttgtcaaggtatgggtgataaagttgaaggtgcaaatactgcagttgaagaaatcaaatctttattagaaaaattaactgtttagtgtagtatttttttgatatacggtcttattattatatactttttatttaccattactattactatttaactttataaacttgtcaaatattctaattcttttagcattaataaagagggttaagaaaaggttcaaattgaacatgcggaacgaaaatttcacttaaaattatttattatcgtcatttgtaaatttttaagccatgatctgcttctttcctttaactaagcatctttctttatatataatacacacagccaaatactattcatttaattatgaaaagaagccgaaacagtttaatgctacttttacaacttatccttgctgtaccaacagttttggcaataaatgtccttaatgcatcagattacacgaacaccatagaacaattaaatttatattctccagaggtcaaatacatcagtaaatctgaatccagcctagatctagacacattgggagtaattcaagaatcaatacccattcaaatacctgttcattacaatgatgttcttgcatacaaatttaaacctaatttatcaccggaattaactcactcttatcagttgttggtatatttgtcagcttcgttatgtagtgttcctgacagttggaatacttctgatccttttaatggaatgaatcttttttatacattcaatgaaacagttgcaaaatctttattatatgatgacatgacgctcattacgtttcagaacggatttgctgagggtctagcacaatcttacttgcaaaatgatagaactgattatacactatatattataatagaaccaagtgaatgtgataattgtgactcggatgatgtttggaatttagaatttgctgcctctcaaacgcaatcattatttgtctatgatacagaacctagaattagtgttattgatgttgactataattccattttatttgaagctgatcataaaatttttgcatcgaacagatcatattcacttcagatctttgaaggtgaatatccaatacctattggtttgaaccaatctctatgttttattaaagctaaccctaatgccaaatatagtttggaattggatcaatctaattcaactagtttttccaatgttttcgtcatttctgacctaacaattgctgaacagtattcagctgttttggttgttgatttcacagatatcgtctacggtggtggtgtctttcaacccttcagttttacaatgtcaaaatcaaaatcatgtaaattagtttatggattgagtttctgtaacgaggtggcatattcagtcccgatttcttcaaatctattgtatgataaggaaacttggggtgattttgtttctcaatatgataattattcagaaagttattatcaaccattccaatatgccatgcaacaaattgcatgtgatacagaattagacgcacgttactctccaataagaacatgtgatgattgtatgtactcatataagcaatggttatgcgccgttactataccaagatgtgtttcctctttgaatgctggtccgtttaacaaagtttataaagccggtacaggtagaaataaatttattgaagacacaatcaaccctccattaccatatgcagaagttcttccatgttataacgtctgtgaagcaattgtacgtgattgcccagctgattttagttttgggtgtccagaagatccagaattggctaaactaagttatagtgatccatcatataatattttagaaactgatgaaatagacatgatcacagaacttgaagaggatggtgatatttatagattgtgtaattacatgggggagaataatatgggattaccggtttgagtataaacctaagagttccttttttatacaagacatatttaactgattagaaataaaacaaatttaagctttttgcttcttttgaggaggttgttcttcatcattaactgtttccttttcttcttctgtgttttctttagtttcttcctcctcttttttttctttatgattcaaagcaatagacttttccatctcttttccaacatcaatattaccacccttagattccaaaactttgaagagaactggagcccaaacttcttcgccgtaattggtgaaatcttccatttcaaagacatttttattaagttcccactctgcttgctttgatctgatcaatttaaccatataagaacttgaaccaacacaacgaccaatatcacttaataatgatctaatgtaagtaccagatgagacagtagatgtgaaatgtaaaagaggtgctctataactttcatcttcatatacatttttatcttctatgattttcattttcaatggtaattctttgttatctggattctttgccttccattctcttgaaaatggaacttcatgatcgttcaatgttggattgttagcaagttgttctgaaattgtcttaccagtttcgtcgacttcacttttgagaaatatgtaatcatgttcctttgataatgtatcatctttgatttctaaatcataaatagtaacttctctacttttaatttgacgaggtaacggtaatccctctcttgcataatcatataatcttttaccatccatttttaaagcactgaaaattggaggtgtttgatctaatgttccaaccattctttctttacatttatcaagaagttcacgagtaacatgatctacttcagttttcagtaaaatttcaccttcactatcaccggttgtagttgaaccacctaataaaccaacacattcatatcttttaacagatccattagtataatcaccaagttttttggtacctgaaccaacaccaatgactaaaacaccagatgcaagcggatctaaagtaccaccgtgacccatcttaagtttatttgtcttccatttctttattctttgttttccaagagtttgatttctgacattttgaagttttttcaaagattcttgtgaagttgaagattttgaaagaactctgttaatttgatctagaacagtacgagaagttgcacctgaaggcttatttattgcaaagacaccatccattattttctttatggacattcaagttctttaagttgtatcaagctaatttacagattaacatacaagtaattaataacataataaaatatttttgtatggtatacacaagcacaaaaaaatttgatcgcagatgttgatgattacgtaacatgtttacaattccctgaatggaattaatctcttggggcctccctggttaatgtggttgatctagtatttcttcttgggattctttttgaattggtacaacaatcaattggggttttttgatcattgaatttaattgggtagcatctacttggaaatgtcccagaataatattggaactgaaatagccgatcaaattattgcagatttcactgctttagcaagtgaagctaaacgtaaaaatgcagaggtcaaacatgcatgtgatcattcaattgaattaacactacctttttcaacaagttcatctagaccccttaatgaattagaaaaacaattgggtttccaaaaaacagctagaaaacatcctgaatatattactccaattataatggcttgtaattctaaaaatccaaaattgataggtctggcaatcaaacttctatctaagtttattcaactgcaaatattacctgattgtgattctgtatctgatgaatcttcagatccttttggctcaattgtggatgctcttttgaatgcctctaacagcacgcccgaagttcaaatcaaattattacaacttcttccaatactcatgcaaatgtacgcatttagaatcaatgatgagatattatgcaatacattatatatttgttcaaacttacaatctgtcaatcgtacacctattataataaacactgcacaggcaactttttcacagatgcttgatatcgtgtttgaaaaattggattcagaagaagggagagatattgccaacgatttaaaatatgaagttactttggatgataagaagacaaccaaaataaaccaattttgttttgacgctcaaagaatagtttcagatttgtgtaccttaattgaacatcataaaccttcgtttcttaaaacaaactatatctcagaggattatggatttgaaatactagaaggtatacttaaaaataactcagatgcttttatcaatcatgaagaattaacgtatttgttgagaaccaggatcattccaattttattaagattcctatcttctagtaaagattttacattgatggtaaaagtatcaagaattatactcctagtacttgagaagcaatttgaagttttaaaaattgaatccgaagttacacttaatatgttgactcatattttaagtaaagattcaggtgctttgatgtggaagaagataatcatattagaattgtttgttttattatttaaaaattcagaactcataaccaaaatgtttgacgagtatgacgataataaagaaggtgaaaagaaaggagtaatatcaaactttttacgtgtatgtttaaccaccgtgaacgaaaataaacatgtgttaaacatgggtgatttgattcaaccacctctatctgatcaagatttaaattcaccaaacaattcccaacgtaagtcagtacctaagattggccttgattcaaaggattataggaaagttgtgaaatatattgattcgatggataaacaggagccaccgatgctaccagatcactataacttatatttaatacttcaaattctgataggactttcagattgtatccaatcttcaacattatcgctaatgaaagctacagatcctgtattatgtatttctgaagagtactttaaggacaatgaagaacctgaacttcaacactcatatcactcagtttacaatttgattcaaagcacctctaacttccagttagatattatagatatattcatccattcaactgttgataacgaactcttttctagctctctcaaactgctagaaaatttatgttattgctccggcatgttgacaaatcagaaagttaaacataaggttttagattatcttggtaaatgtactttaaaacttgatggtacacttggttataaaagtaaagttatgtcaattagtgaaacaattgttggtacaatcagttctacttttggtaatgccgtatcaaatatatcaaatcaaaataatgtaactcattcagtaattcctccaaagttttatcctagaactatcaatactagacaaacattatgtttccatactttaattcggttagcagtgtctttaggagcacaattgaatgatgattggaatataattttatgtgtcctgcaatgggttagttactatatagatgggccaaccggatataacaaaaaggatattcctcctatctcacagtatctgaacaatagagatctgcaaataattagtcattctttatctgaattcaataaaagcatatttaatcacgatgaagttacatatggtatactgatcaaaactggtattgatctatctgaaaagctgatgtcaactgtcaatgatgaaaaactgggtcaaacacctataggagaaaatgatgaaattcaaccttgtatattcaacaaattattttatgttaacaaaattactgatttaagtacactcaatccaatcaactgtttgattttaccacaaaataattttgatatattgaatcaatactattccgacatttcggacaacagaaattattctgaggatgttagattacttggaagtagatcattcaatcaaatagtgaaagtttgtgccgatcaagggtttgaaagtaaagattcagaaatacatttcaaaacagaaactaaagttttaacaaatatgtgtagatttttggagaaaatatcagcactaccaatgtcaaatgagttactagtggcaaataacgaatcagaaatttatttacagactttagatacattgaagtacataattgatagatatggtagtttaataactgattcttgggttatagtcactcaaatgcttaattttcctttcttaattattaaaaactgtgattcagaactacaaaaggaaaaaattataaatgataacataacatccttagttaaatcatcctttgaaactttgaaagttattttagatgaaatgttgcaatctattccaaaaaatcaagttaaggtcatcattgatagtttgtacaattttgtgaatcaaacatttgatttgaatatttcatttaattcggtcagttatttttggattattagtgactatattaaagacaaacttgagtccttaaatctaacaacatctttaaataaatctattcaatctgaagaagatttagttgagctaatcaatgattcatcaattgaagagaatcaatacttccagtatttgtggttatacttggtattcaaattagcaaatactacaggtgatacaagaatccaagtaagaaacggttccatcattacaatttttggtattattgaatcatttttatctgaaggacctctggtaaatttactatacacaaacgttttgaaaccaataattttgaacaaagatatttctgatgtgataagaaacttgaaaatctcagagcaaaaagagtggatggaaagttttattagtatagtaaatggaatgaataaattttattcaaggcaagcaagtgaaaagaacttcctctcagatgacaatttgagtttactcgaaggtattatcacatattttattggcttatcaaacttagattacaattggattgaattaaactaccagattttcaaagcatatcttgaaatacttcaaatttttaaaagtagaacagagataatttcaaagcaatatttggaggttctatacttaccatggtcattaattaaaatcaactacaattttaacaatggatcactgtatcaaacatcattatgcacttttgttagttgtttttctttatcacttcaacttttcaagccaattatgaatccgtcaaaatttgaaaaaatgttaatggtattgaattcatgtattaggtatccaattattgtagattcaagaaatgatgacaagaaatgtacaagtttacaaaaagccgtgttagatagtttagcagagctagaattagatcaaaatgatccttctttcattacttatgaatcactgttaatccaacaacttaatattattgttggactaccatttcatacaagaagcttgattgttaataaactgggagataaaggtataaagattccaacatttgttgctgcaagttattatggtatgttaatattggaaacacatctcaagattatattcaatccgaaattttttaatgaacgtttactcttgaaaatcactaaagcattattagagcctacagaacttaaacccgatattattgtggcaagaccgagcgacttaccagagaagctaatagattctactcaggaacataacgaagatgcaaaatcatacctttggatgttcagttttgatatggtagttgaaattgttgttcaagtattgaaacatgtaatgagtctttcagaatccgaatttaaatcaaaaatttacactgattcatttgatcaacttattcaattatttttaagtgtttttgattgttgttttgtccttaatagtttaggaaaagatgctgatgaatttaatctaaggaaatatgaaacaatgaaacctactctttttgaatttttgaataattattataaatctgagaaagcttatcaaatcaaaaaggaaagtattgaacatgttatattatcattatggagatcgtcatttttcttcaaacatgattcgatcatggaatctgttattccaaacagtgacataaattgtgaatcaattatcgaagtatttgatttattgtgcgatgatgaaaattggaacatttatggtgttgtcgataatcttgttgttcaaaatagtttaagccattcaatggtcacattcaatgatttattaactctaagtaatacagaaaattaccctcatatttcaacaattgtaataaactactttatcacgagatgtgcctacggattaagaaaatatttcatggatactaagattttgagtggaatgccaatgtctaatattcaacaagttgaactaaaatacattattaagggtcttatttctttgttggaaaatcataggggtaatacgaaatctacagctgaaattttgagtccattgtatcctttgataattaaaatattaccaacagttaaagaaaaggaaacattaacaaatatcgataaagtttgcatggaattgttcaaacaatcaaaggtgtaattttaagtaaatttgacataactgacttttatataattattttacgttaagctagatctattttaaaaatgtaagaatatgctagaaatttattacatgatagataattcatgatatatagattttttactataaatgttgtgcatcaaaattgtgtgacatgtcaacgtattccatttcattatcataaacatgatcaccaggattataaacagatgcaaagttaggttgactcatcagcttttcttcattattctgatcttttctcatttgttcaaactcacgccatgtcatttgcttaatttgtgaaccatcgaattcaccatcagtatcgccatgtccacctttgtcaccaccttgtgtttttctagtatcaccccaactgaaatcatcaaacttccaaaatgcataggttggcagaacaaaattccaaattggtaatgctaagagataaatcaacatccacaaaacatacattaagttggagacggtgattaaaatcaaaagacttggtaaaccaaaaacgacagccaaaagaacgacaggtaataatgggaatgtactggaaacgatagcagataaaataacgtaaagagtaaatgcaatagatgcaggtaaaatcagtgtaccaatcaattgaataacaatgatgaattgcattgaaaagcagaaagtaccacataaatctttaaccaaagccaattccatcaaattatgaacagtggagttaatccaacgacgtctttgtgataataagactttaaaactatctgggacgacagtcttacaagcagctttaggaacaaagacttgtttacgtctcgggaaggcacgcaacatcaaggatgttaaatatctatcttcacctaataataacaagttcttcttgtgtaaacttttcaacacattatctgaatatttttcaacaatatctgaattggctaaaattggcacccaaacgttattactcttaggtgccttaatacgatacatacagaaacatcccggtaaacatgtaacactaccaaacactgattcaaaggcctttgattgatgatgtgaaatgtaatattcgaaaacttgaatggctgtaacccatgattgagccttatttgatattttagtctcaccacataaacccatgatctctggatctttgacaaactccgctaccatgtgggttaaggaatctggatagatcaaagtatctgcatcaaccatcaaaacagattcatacattgtaaccattaaacctgtaatttgccaaattgccttcagcatttcatattgcaaaggagtcattctttcattgaaagtaacagcctgtaagaaggacattaaaataatctgagaatcacgtttacctctattacccggtttagctgatgataattcttcaggtgtaccacatttaacaataagtaaaactggagtcttttgttgtttttcaataggaactgtagaatcatcgtatttatagaaacctgaatatattttggccatattatgccttttagaaccatgagcgacagagacatatgaaaacgcttggacttcttcctttggaacaacgagatctgtcatcatgtctaaacaaatatcaggagtggatttttcattacctgcaccagtaatcataccatcacaaaccaccacgaccaatttatgagaatttggataatctgtagttgcaatagaatcaattgtagttctaataccatcagcatcttcggaataacaagtaaccaaacacatagtatgaattaatggatagccaaaaggttcccaattaactggaggttgggaaataacatccggggctataagagaaggatctaaagtttcaatttcaccctcttcaaatggatcatttggattagttttaaaaggattcaaagtcaagttacttgtacttccaattgataaacgagacatacttcttgatcttcttttgttttcaccagccatcatatatgcctcagtagtcattgtaatatattttggttgataattactggaactattaactaatgacttggaaggattgtcaccaatgaattcgttgatatcaccaccccaagataatcttaaacctcttttagctttactagaggaatgataatcggctcttctttgaattggaacatcagaaattggcgcagaattatacggattatcaacccaatcatctatttgattatttctttgtttcatctctttaattgatgaggaagagacaccttgaaatggagaaacaaaccatttgaaataacatgcaaccaagaattgaactattacaattgctaaaacaaatactaaggagacccataaaacaatagttgaagcaatacaaccaacagttgtggtatcaacaacaccaacttttgctatttctactaaacaatcggcagcttttctatcttctccctctgttaataataaagagatatcataacctcttaaacttttatcatttttaatatcatcgaataatttagggtatgataattcatctttatagatccaatctataaatcccatatctataacattaccattatagacaacaaaatttcttgtagtattagtgatatcttcccatgaataataaatatcaccttgaaccttcagatcataaaaagcttttctagcggatgacgatgtgtgacaagcataacctgaataatattgagaatcaaatgatggagtggttgaaccatctaaatccatgactgtacatggcatataccatgctaattcattaccaacatgtgggattttacagtccggttttggtactataagatctttacaattaccattaacattttgaaacaagaaactaccatctttaccaccagcattcaccggaggatataaaacatttgcaccggcaataattcctggtgcggcagggtgcttagaacgactaaggtcataagctctaccgttgaaaaccatataggagttattaatatctgctggtttcattttagcaagtaatttagtacaagtaactcttgtaaaaccaaaggttaaaaatccaacaatggaaccaattactaaaatgacactaatcataccaattttctctctccatgcatattgtctatctttagttttcataccaaacaaactcatcacagggccaggagcccaaaagatcaatatataacaataaagtttccaataagggaaaccacctttatcttcttccaaactcattcttttagggggtatagcagtataaaaatcgtcatttgaagttgagttatgatctgtataatgatctttgcttgatccagtacttacgaagggttctttaagttcatcaactataggtttattaatatgttgatcactattatcaacatattcatcattcagatggaagatttccttcggtttattttgaaagtttctattaaataattcatcatcggaatcatgttctttaacattatttaagttaaaaggatcgggatttctaattatatctgtgttatctgaatcaattgaatgaaggcggttattataatttctattttcaaatggtggagcagacagattttgcattggaatatcattatattcattattaaaaccaaaatcattatgttgatcatcagtatatcggttatttgaattactcattaaagaacttattggcgcactatttgaatatttatttttattattgaaagaattagaatttggaatagattgaccatatcttgcactatttctatgtactgaactttggaaagaggttggtcttgcacgttctcttttcactaacgatctctttctacccagatttccagattctggatctagggcgtcatatgctgatgttgccgaagcactattttgacctgcaaagttctgatatgcatgtggcactgtatgaataaaaaaggggtgtgttttctctatgttagtaactttgttatcaatcaatgaaagaaataattaaaagatacttacttttcagtatatattacaggagtatttggtctattggagcttcaaagtggtgaaagaccctaacaaaacaaagcaaattctacccaattcaagatcaaatcaacataaaaatatagaatcaaattaaagacttcatcgaaggaacgatttcaaaatttaatttttcgttgtgaaatttccttttttagatttttgccctctttggaataattgctctttaattgacatcgccggcgtaagtctgacaatagcccgcctaacagatagaatttcatggggggatcccgcctaaataaatttttgggcggcaccaaaaaaaagtggaaaatggaaacttcgcgtcgccaaaaatgtgaaaattcagttttatcacggtttcagttaattaaagtaccccgtatattaggagaagaggaagacttataataaaaaagtacttttggtttaaataatctttaataggacgttgaacaatcatttatacagaagatgcctgatagaagaagtccaaggaaaagattacatcgtcatgatgaccattcagatgctgacaatagctctgatgaagaagttcaaagaagtactcaattaagtagtcctcaaagaggtcctaatttaggttatcgtcgtaatcctttaagttcatctcctccaccttcagatccagcattggatattgcatcatcaccaaatgctgaaccatttgcaaatgattctgaggaagaagaaggaatgggaagtgtaaaggatgaaattgaagatgatttacgtgatttagatgatgaaatggaggaagcaactggtagagatcttattggtgatgatatgatggaagattatagagagcgtcctgaagatgatagatatgatgatataaatattgatgatgatgccgttgataatatggatattggacagagaagacaagttgatcaattcttagatagaagggatgattttaatagaacacaaaatttagatcttgatgatgcagatgatgatagaatggatgatagatcagaagatgaatttggtttaccaactcaaagaactagaagaagatttgaagaagatataaatgatgaagaattaccttcaaatgaaattacttatgcacaattgattgatgttaaggcaccatctgttcttgaatggatttgtcaacctcaagttacaagaacaattgctagagaatttaaatctttccttttagaatttgttgatgaaaatggtagatctgtttacggtcctaaaattagagaaatgggtgaagcaaatagtgaatctcttgaagtctcctttaataatttaatgtcatcaaaggcaatattggcagattttttgagacaatgtcctgaagaaattatgaaaatctttgatgttgttgcaatggaagctgttgaaatccattaccctgattatacacaaattcattctgaaattcatgttagaataactgatttccatgatttattaaatttaagagatttgagacaatctcatttaaacaaattaattaaaattagaggtgttgttacaagaagaactggtattttcccacaacttaaatatattaaatttgattgtcctcaatgtaaaacagttttaggtccattcttccaagattcaaatcaagaaattagtgttagatattgttcaaattgtgaatatagaggtaaaatgttaattaattcagaacaaacagtttatagaaattatcaaagaattacagttcaagaatctcctggttcaatgcctgctggtcgtttacctcgtcataaagaagctattttactttgggatttagttgatattgttaaacctggtgaagaaattgaattaattggtatctataaaaattcttatgatggggttttgaatgctaaaaatggattcccagtcttcgcaactgtcattgaagcaaatagtattagacgtcgtgaaggtggtggtggtaatgatgaaaatggtgatgattcatcatctccatataaaattaccttagaagaggaaaaaatctttagaagtatggcaaatcaacctgatattattgataagataatctcatctatggcaccatctatttatggtcataaatatattaaaactgctattgcatgcgctttatttggtggtgttccaaaagatgttaatggtaaacattcaattagaggtgatattaatgttttattattaggtgatccaggtactgcaaaatcacaaatcttaaaatatgttgaaaaaactgcttatcgtgctgtcttctcaacaggtcaaggtgcatccgcagttggtttaacagcatctgttcgtaaagatccagttactaaggaatggacattagagggtggtgcattagttttagctgataagggtgtttgcatgattgatgaatttgataaaatgaatgatcaagatcgtacatctattcatgaagctatggaacaacaatcaatctctatttctaaggctggtattgttacaacattacaagcaagatgttcggttattgcagctgctaatccaattggtggtcgatataatagtacagttgatttacaaagaaatgttaatttaactgaaccaattctttcaagatttgatattatttgtgttgttagagatttatgtaatccggaaaatgatgaaagattagcaactttcgttgttgattctcatatgagatcatatcctgaaggtgatgatagtatctttgatagtgaaaatgaagatgaaaatatgtcagatgatgaaatgaatgaagaactaattcgaacaagaagaagaaagaaattagaaaaattaagaagggaaaaggaaagtgaaatttctccaattccacaagatattttaaccaaatatatttattttgcaagaagtcgaatacaaccaaaattaaatcaaatggatatggataaagtttcacgtgtttattcggatcttagaagagaatcaaatactacgggttctttcccaatcactgttagacatttggaatctattcttagaattgctgaagcatttgctaaaatgagattaagtccatatgtttcaagtattgatctagatcgtgcaattaaagttgttgttgatagtttcattggtgcacaaaaagtcagtattagaagacaattacaaagaagtttcatgaaatatactttaccacatagaagttcatcatctaacagaaccagaattaatgcaactgctacttctactgcaaccgcaactcgtgcttgattttacattatatttctttacctttaatttttttagttcttttttattacatacgtttcaaatcaatcatgtattgatttatgttcatttattcaattgtatactactataagctttatttacaagcatcaatttgataacctgccagtaatccctttatagcaacattgctcctaacccaacaaacagtagttagtaatcggcccctcaatgaaatttggaaatttgtttttccgtgccgtgatgatgatggcggcaacgaaaaaatcatgttgctgttaaacccacagaattatcgactaaattgatcttttcttatttccgtttctttactgaataggtggatatttagagaacaaacatggcatctttgaccaaagttcccaatccagtcaaacccaatgatatcttttatttcattccaaatttaattggatactcaagagtgataacattaatcttatcattctttacaatgaaaaattatccaattataactatgggattcctatatagtgcatcatgtttattagatgcatttgatggatattatgctagaaaatataatcaatcaacccaatttggtgctgttttagatatggtaacagatagatgttcaacttgttcattaattgttttcctttcagtattatatccagattattttattgcatggcaagtattaatatcattagatcttgcatctcattatgttcatatgtattctcaaatagttagtggatcatcaagtcataagaaattaaaggaaggtaccaattggttattaaagttatattacgaaaatcgtacattcttattcttagtttgtgctcttaatgaattattctatattgcactttacttatatcattttgatatattttacttcccaggtacatcgattgatttagcattctggcttattattgtttgtactccagtttggttctttaaacaagtttgtaacgttattcaattggttaatgcatgtcaaattcttgcagagttagatgcaaagaaaatcaactctgaaagaaaggctaattaatttatatcaactaatattattattacatagaatatcaagtacatatacgatatttcaatgacgaatattcttgttttttatactactttgaaaaaataccttttgatttcaaaaaggaacgatttgactattttgagctatctttgatttctacttatttacacacatgtatacttctccatcattaaatgacttaatttttatctattgcatttacagcttgtatttgaacgatcttgtattcacatttagcaaaaaattataggataaaaagctttcagcagttaaacaaagttttgaaaaataaaggggtcaactgggaattgaacccagggcctcctgcacccaaagcaggaatcataccactagaccattaacccttttatgcaaaaataaaacaggcgcttttctttgattttattgtgtttgtcacgtgactctgaaaaaataataagtatttttttattacagtacttgttttttaaagtcaaatgaagcatactttttatttaacatttgaaaaaattaaaatatttttaaacttttttggacatccaccataccagtaataaataattttcaaaacatcatatttttggattctaagtttgttagctacattcattaacaagcaatttataattaaagaagccacagtatcttaatcattaatatttatacgaaaacaatacaactacatctgttaaccatacaaagaaaataaagattacgtaactaagtttaattaaatcgcacgccaatctcaaaaatcatcaaatctacgaatcattatttcatgatccaatattgatatactattgaagaacgattgagtagattgaagaacaaatggcgaagaagaataagaacaaggacactaaaactgtgaagaaagttgaaactaaggaaccagaaattattaaagatgaagaaccaattgtagaaactgaaaaagttgaacctgttactgaagttgagaaagatacagcaatcaaagaagatccagctactgaagtggaggagaaaccgcaagtcatcgagacagcaatacccgatatcaagcaagatgaggaggcggagattaaacgagaagagattgaagttgtacctgaggtaaagaataaacgtttaacattacaggaaagacttgaattagctgcacaaaagaagagtaaggccaatgctgagaagaaagctaaaaaaataattaacactgaaatagaaaatagtaagacaactgaagtggaaactaataacgataagaacgataaaattgagttaaaagaattgaatctgaaagatatacttactgaagatttaaccaataaccaacccgatgttattgaaaagattgaaaaatacgttagttctaaaattgatagtgttgaacagtcatataaggaaaagataagcaagttagaatctgaacttgtgaaaaagagtaaaacctctgttgatatcaaggacagtaatttaatagaaaaactcaaatctaaggatgaacaaatacgtgagttattagatgaaggtaataagttatctagaaaagaagttcaattaaatcaatccattaaaaaattaaaaatccatgaaagtgatttagaatctgaactagaaactcttgaaaaggcgaacgaagatttgagtggtagagtagaatcactggaagggaaggtcgttgattatgataaaactactagacttttagctgaggagaaacttgcaaatgaaacattaaagaagaaatttgattctttaaaagttgctaaggatagtttactagatgaacttaaagagatcaagttcagtaaattggacgttcaattagaagatgttaaaaaagagttggaagaaaaggttaaagaatttgaaaagattcaagataaatatgagaaattattagtttcatctaaagatactgaagatacattaacattcaagataaaggaattagagaagaaattgaaagaaaatgaagaattagtctatgatagaaatcaagaaattaaaagacttgaagaaaatgttgagaaattaagatttgataatgaaaatatcatacctactgctagtaataataacaataacaatgaaatccttcaacaacaatatgaggaagctcaagaaaattggaaattaattgaaagttcatatttgaagaaaattaataattttgaaaatcaaattgaagaattacaaaatttaaatattggatattctaagaagataaagattctaaccaatgatttaaaacaaaaatcgattgattattcaagacttgaagaacaaaatcaattgtttgaaagtaattctggaacattagagaagaaaattgaaacacttaatcaaacaaataagacattaaataataatttagaaaaaattaaacttgaattcaataaagagaaagaaaattttgagaaacatattcaaaaattagagcaagaaaaagaatcaattgaatcaagattgaaactacgtaataatgaatttggaccattaaatccacctaatactaatagtttctatttacaagatttatcatcatcttcatcattaatgaaatcattaaatacacctaatttgaataatcgtgtcaataataataaaagatattcagtccaattaagcgatccaacacaactaaatagtagacaaaatgcaccactatcatcaagtaattctacattctcattttcaagattaaataatatgcaaccaatgacaccacaggatagaattttaagacatcaaaattctattgtatcatttgatagttatgataatgataatgttagagaaaatgtgaatgagaatgatacattaatggataatgaaggaccattaggtattaaaataaatcaatcatttgcatcatttacaacaaattcaccacaattgaatgatgaagatagtgaatttatgatgtcaaatgatgagattggattaggtatggatgcagagactgagaatggtatgaatacaccaatcattgagaatggtaataataatgaaagttatattggtaagaatattcaaattatgaataaattagcatcacagatacgtatacttgaacttgaaattaatacattgagagaagatagtaaaagattagaagaagagaaagaatctgcaagtaaagaaattgttagattaatgaatgataatgaaaaagttgaagagattagaggagaagttaaggaacgtgatggaaagatagcaacattagaggaaagttatcataaagtattgataatattaggagaaaaggaggaaagattaggagaattagatgctgatgttgatgatttaaaagatttattaagacaacaagttcaacaaatggttgaaatgcaagaaaagattaataaattaagtaataattaggatgatttaatgagaaagaagaaatgaagtaagctttgttctatagattgagtgcatagtatagatatttatatgcatattgtattatatttaatatagaatatgattaaaagagatatattatattgtattgtattgtattgtattggatattgagatatgatttaaaatttttttaattgttaccttgttcctttgctaatttagtatgggtatcaatatcactggattcccaaggataagcaatccatttatcaggtacatcttcacctgataaatacataccaccattcattaaagattcatcaatttcagctcttttttcctttaatttattattaacaacgaatattgaaaatttagtattacccatatctttacctaatttttcagcattttccttaacatccttatataattcagttaaagcataatgaagggtagttcttgtatcatcaacttcatcaacaattaaaatatttttaccaattaatgaatcaaaatgttgagctaaagcaccaaaatctaaccattgagtacgaataacttctttaccaattgaatcagaacctgtacctaaatcttcataaagtgataaaccaatagcttgaattggaatatttttttcaccttgatgtcttaaaaatgtacgaataattcttgatggaataaatccaccaccaccaatagcgactataacatcaggtttaccaacagttgataagatttgatcagctgccttttgacatagtttatgaacacaatcgtaggagatatatattttgtcttgggacattgtttataatgttaaatagatgggttaaagatgaccaagagaatgaaagttcattagaagagtcagtattaataaaatagttaaagattcaaattgaaaaacttaaaatttttttttctgcaaaaatatttcatttccgcggttggagaagtctgtttacgaggttagttagttatattacgtaattttattttatctattctattctatacactattcatcatcttcctgttcaagttctgcatctgcatctgcatctgcatctgcatcttcctcctcttcatcactgtaatcaaatcccccctctccatcaaggacaacacttgcaccttctaatgtagtattgttgaattctgtatcattttcagtaatatttccattaagttcactattattagaattattgttattattatttgacatcatctctctacggatggttaattgatcattaagtaatgttaatttacctgataatttaaccatattaactaaatgtttagtctctgaattaagaatgttttgtaatgattttaaatatggaattattgatttatttgttaataatattgaacctcttaatataagtataaattttaaccattgtttaatattatcaattaataacatattagaatgtaaattattactttgtctatgataattaataacaatttgacatgctttaataaataaattagttgtttgttcaatttcaagtaatgtaattaatgattgtataaatgtaacattgtttgataaaattctaataaaattatcagattccattgattctaatttattatcatcatttatataattttcaatttgtgattttaaatcatgaactgattcaaatggttcttgtgattcttcatcttccatattttgactaatatccttatctgctcctgcttcttcattatcttcctctatttcaccttcttcttgaactttaatttcttcatgatcattatcagttacatttattttaactaaattttctaaatttttaatattattaaattctaaatcagttatcttaatattaaaattatcataccaaattaatttgaatacattatcaattattgatgtatcttcattatttaaaactggggaattttgaaatgaaatcaatttaccaatttcactaccaccatttatttgtaatttagcaaatggtttattattaccaaaattaaataaatcaattgatccatcaattaatgatgctgatataattttataattttgtaaaatattataatcattgatgttactcaatgaattataagttattatcttatttgaatttgaatctaaatctttgtataaattaaatgaatatatggaattttgatatgagatatagatataaccatttgaaaatttgaaaattgaatctgagttgaatttaatattagataaatcaatagttttcaataatttataatccatattaagtaaatataattttgaatttttttcagatataagtaaaattgattgatcttcatcattataaataatatttgaaattgatgaatcttccttaaatggaattgaacgaataacgcttggtgatatagatgaataaagatctatagttgaagatgttgaattaaatgtaattatatcatgatctaaatttctatcagtatatataacttctaaagctgaaaattttgaatctgatgaaattttatttgtaaaatcattagaatttggtgaatatataataatttcctgtgaatgtaaccaaataaccaacatttcgattaataaagaatcagtttcttcattatcattatcaatattatcatcattatcatcatcattagctgatcttttattacgattattaattggtgatttattttgagtccaatgaaatgaaagtggaggttcatcatttggataatcaatacgacgatttgatgggaaaagtgccaaatgggtattagcaggatggcaaaccaatactgcagcagaacctgcaggagatgtgacagtagacatgtgatatgaggagtggtttccaagttagaccagcagttaaaggtatttccagtgattaaaagtgaaaaatttaaaattttttaaaatttttttattttcattatgtgtgattacgtaaattatcttaagatagtattagtattagtattagtattagtattagtattagtatacagtggattagtggtatattagaatggtacaagtatagataggatgttattactctccaccgtcttgtctgaattcattctcagctaatggccctactccaatattagctaacatttcctcagcaactgttggcttacccattctccctaatgtttgtaataattgagtctctcgacgattagatgcatcaatatccgcctgtaatgaaacaatatattcaactgctcttgtaagtatttgtcccttattaggtctaccatctctagtaccggtatttctatctaaatcttgaaacatttccggtggtataagtgacagtaattctcctatacgttcattaacaccatctccacgtctctgtgtttgagattgcgtttgtaactgtgtctgtgattgtggctgtgtgttattatccaccggggttgacattccaatatcttaagagaatataacacaaagaagatatacactaaagaaggttcaagaacaatgaattgagtcaacgcgatagcggaatcgttttcttaaaatggaggtttttgccattgaagagtttatacaactgcttaatactttccttcttttgacaaatagaaatggttgattactccaaatgggacgctcttgaattatctgatgactccgatgtggaagttcatccaaatgtcgataaaaattcatttgttagatggaaacaaagagatattcatgaaaagagagctcaaagagagaatgaaattaaaggtttaaaaattcaaaaagaaatgtacactgcattaaattcaagaatggatcaattagttaaagaaattagtgatgatgcaattgtcactgaagatggtagaaatgatttcatttcaaaaacttttaattcaaaggaaaaatgtaccttagaggatgatgatcaagctccaacttataatgaaatgatggaagatttatttactcaaattgaatctgatttgaaaaaagatggtcaatcaatttctcctgcaaatattaaggcaaaacttgctgaacatagactgaaaactgaatccgtgttaaagcaaatcgatccaaaaattgaagaaattactttagaaaaaaataaacatattacaagtgatgatattcatgaaggttggaatagttcatttatcaacaaaaaacctactgaatctaaaccaactactgcgaccaacaaaactacaacaattgaaactcttaactcacctgtaaaatctaaacctgcatctacatcaaaatccacaacttcaactacaactataaaaccttcaaagccaatatcagaacttggagaattagaactattacctgaaacaattgaattttctaaaattaataatcttaaagaatcttgtaattttatcatttcacattcatttattgcatgtactcatcaaaaggatgcgttattaatgaaatcttttgattatcaattagctgatgatactgaattagcagcttcaactatagagaaaggtattttattacaatttgcatcagatattttagaaaatgcacctgatccaaatatgccaatggcaatgcgtttagaatatattaaacgtcttttcggtcaactagaaattgaaaattctccaagtagaaatgcatatgaacaagaatgtggaagaatgattgaacatgttaaaactcgttgtaaaataattaaagctgagcaagaaaaggaaggtgatgatggtgatgaagaaggtgatgatcatttagttgaacaaattcaacttagaagtatggatcctgatactaaattagttgttaatataccagagaaaggtactgatgaatataaaatttatgaagaattaccagatgcaatgaaagatgctttaaatactggtagtttagatgaagtcaataaagttttcgcaactatgcccgttgaagaagctgaattattacttgaaaaattcaatgaatcaggtgttattggtattcaagcattattggaaaatgaagaacaattcaaggaattaactgaaaatcaacaaaaattcgatcaaatgaaggaagctgcagaaaagatcaatcttaacgataaactaaatgagttagtataattgttatattatcatatcatatcatatcatatcatatcatatcatatcagatcatatcattttaattttataaagtatcaattttatataaacaactatatacataatgtaaaataaagataaagattcattccacctgtctgtcgtgattatttatctaatgctggcattcttaagatttctctttcagagttcttagattcttcttgtaaaagttttaaaactttggaattttcccatttctctggtaatggtgtgattttataattctttgtagcccaataataaatatcccaatctaactcatctaataatttatcatattcaactaacatttccatatcaaaattatctaaatatttctttgcaaatcttgataataataagtcagtctctaaaatacctctctttctactttggtaaactaatcttttacgtaaatgttcaatagattcaccttcacgacttattggttgaactctaatgacaacatcattattttcatcaacataataatttttaactggttgaccttgaataaaaccttgtggggatgattttttattaattggaataggatctgcctttggagcttttatagctaaacgattaatcgagctatggaatccacgtacacctaatctacctctaaacatcattacctttgtgctaagatatattaaatgaagatcaagagaacaagcctctgattatcggaaaaaaaagtgcacatttccatcaatttcaaatatcaaaattattaatcatcaattaatttttcaacatcaattatgaatcattttgatttgcttttccgttttcggtgtcgaaatagttcatcaatataaattatatattaaatgtcagttaagaaacataagcttgacgatgatgttgcatcatctgcagaggatataactgctaaacattcatattctataattagtagaataacaaatgaaactaaaattcaaattgcattatcattaaagggtggtcatatttcaattccaaattcaattttaatgaaaacttatgaacctgcaactgacagtaaggcacaagttatttcaatccattcaggtgttggatttttagatcatatgttacatgcattagcaaaacattcaggttggtcattaattgttgaatgtattggtgatttacatattgatgatcatcatacttgtgaagatattggtattgcattaggtgaagcatttcatgaatgtgttacaaagcaaaatttattacgtggtgttaaacgttttggttcaggttatgcaccattagatgaagcattatctcgtgcagttgttgatttaagtaatagaccttttgcagtggttaatttaggtttaaagagagaaaaaattggtgatatgtcatgtgaaatgatccctcatgttattgaaagttttgcaacttctgcaagagttacattacacgttgattgtattagaggtgaaaatgatcatcatcgtagtgaatccgcttttaaagctttagcagttgcaatgagagatgcttttactaaaactggtggtaatgaagttccttcaactaaaggtgttcttatgtaaataataatcatactatttaatatacattcatatatacatacacatgtacaattccatacattcttttgtcagtctttttaaataaaatttactgtttattttctaattcataacgtttctgtctccagacattgtataaacctaatgaaccactagttaaccccaagacaacatgtaatggtttatacatattccaatggaaaatatatttagcatcaaagatcatatcacatgttaaacgaattgcattaattttaacagtagttttatctctcttaacctctgataattcatcataatacatttcatcgtagtacatttcttcttcaccagcaatttcagtatcttcattatcatatttatcaaaatcaggactttcattacgtttagtagtagtagttatctcatttgaattatttttcttgatatcacttactattcttcttgtacgtgctttaacttttttattcaatattattttagattctttatcctttaataaaatccatttattccaatcattatttaaaccgagtaaaattgatcccatccatgaataaagttcatgatcttcagcaaattgaaataatgaattactgaaactatccttaccattactattaccatttaataaaaatttgaatctataaagtaacagaatttcatcagatattgcataccaaaaatttatcatttgtgatattaaatctttacttgtccaatatttaataacagtttccattttaactgcaggtccgtctaatgatgttctatctaataatatcttcaaactccatttaatatgattactaaatttccaaattctaaatggtatcgtgccagcacgtaataaatgtctataaatattaagaccttgaagtaatgatgataatttatttgtaatatatgcaattataataacaaatccacgatgaatactcttttgtgacataatctttgcatatttattcaatattttggaaaataatgttataattgttgaaattgaattaaatttagtttcattattatcgtttgaatcaacagattcaacaacttcaataagtttttgttcatttaacactggtcttacaatattcccattagtatccattcctaaatgtttagccagacatggattaccgagtccatttacttcatgaattgcagcaacagttctaataccgtattgaatagttttagcaagtttatccttacctgtaaggtcattaacacaagcattaaatacttcaaatcctgatacttgtctcttacttggtcttttaccattgtttttaacaatttctccttcatatggagcaggtaccacttctttcaatcccataacgttgtttattttcaaataaaaaaacagtttaattaataaacaatcagaaacggaaaagaaaattcacaactttaaaatttaagctaacgattcatgactcattccgctgtggaatggttttcaatcggacattcctttaagcttcttttctttcttttagaaaattatacttaagtttagctctacaagtcaattgaacatgtcagatacatcattaatcacaaatacaacttgtttacacgtttccaatttagaaaaatcagttgaatggtacgtttctgccttcaacgtcgttgttgttaaggaagtggaaactcccgcttacaaatccgctttcattgcattagatggtgaagataagggtaaacctgtatcagctagagatggtgtaattgaattaagatatcttaagaatgcacctgcaaatgcaaaaatttataatggtaatactgatccatatagaggtttcggtcatttatgtttctcagtttctaatattcaagaagctcaaaaacatttattatcacaaaatgttgaatttaagaagaaacttgaagatggtagacaaaaaagtattgcatttattcttgatccagatcattattgggttgaattaattgaaaatgaaattaataaacaaccaaatgaatatgatttatcatcaaataagatgaatcatacaatggttcgtgttaaagatccagttaaatcattggaattttacaaaggtacattaggtatgaaattattttctaagagagatcatcctgatgctaaatttactttatatttccttggttatgaacataatgatagttatgttgaaggtattgaggaacgtaccccacaagcttgcagacaatcaattattgaattaacacataattggggttcagagaatgatgattccgaatattacgttttcggtaaggatgaatccgttattggatttgatcatttctccgtttcatctaaagattctgcttcatttattaaaaaacttgaaagtcaaaatgttaaatttatttcaaatgatggtacttcagcaacaattgctgatccagatggatggaaagttgaaatccattcatatgattacttaaactagtatgtatagatatatcctggtattttttttacgtttttatttatataactgtatgatatataaagacaaaacaaatgatcaaacttaatgaactattatactaacatgaaattttgatacattacttagtacaagcaaactgtaaaaaatatatcactatttactcttctttaaatttcaaactaattgaattaacacaatgtctttcatcagttggagttttaaaaccttcacctttgaaaacatgacctaaatgtccaccacatccactacacataatttcagttcgtatagttccaaaactattatcagtttcagttttaattgcacctggtaaaccttcataaaatgcaggccaaccacatcctgaatggaattttgtagtagatttatataatggttgtccacaacctgcacattcataaatacctaatttatcaaattcattatattcaccagtatttggtctctcggtagctttttctcttaaaacagcaaattgagcaggtgaaagtactgccctccattcagattcagttttaactttattagacatactgtagaatctcaaacaagctcttcttgcaatgttcatcgtataaaatgtaaatgaaaaagttaatagaagagttagtgatttataatactatgggaccggaaaaaggtactaaatcgctgattaaccttaaatcgcttatattatcctggattaaaatctagtttataaaaaaaatattagctttgcaaaaagatatatattaaagaatgaagcataaatacataaattaaacaaaaaaattataattagtaaacatatttaaagtgtttgttttgtttatcagataaatctaattgtaaattaccttcaataatttcaacttcttcaatttctttacctgataaactttcctttctcttattttcaaatctaacaactaaataatataatataccagtaaatgccataattgcaaatgatgcctccattgcatgaatacccattggataagttggagattgtgaatctttgaaaaaataaggaccaataatattaccaactgcataccaaacagcaactgaaattgacataaaagttttctttgtgacacctgaagtatttgatgatgttaatgctaacattaaacaccaaggaacattatagaatcccatcaggtaaacaccagctaatgctgcatgtctattttcatgtggattaattttattaaccataattgcacctgcaagtgcaggtaaacaacttaaaacccataataaacatctaatattttcaatccacatacataaagctgtaacaattataccaccacctaatgcaacagctgcttgaggtgatgccattaaagtagttttcaaagctgaaaatccaaaacctttaataattaatggattgaaattagttataccagcatttgtaattgattggcaaataatgaatgcaacaattatataatattttggatcttttaaactttcaaagatgtgatgaagattaatatttgcatgttcattcacattaacttttgtaccagtttgattaccaataattcttaaatacgcaatttgcctctctcttttagttaaaaaccaagctgtttcaatattatcaggtaaaatgaagaataataaaattgaataaacaactgtaacagcaccataaataatgaaaagatatttccaagttggtaatttaccattaattaaaccaatacagtgaccaaagataccacctagaataccagctaaagtgttaaaatataatactgtacgtaaaggttgttcagatttagtccaccaaattgaggcaataatcatgaaacaaggtaaaattgaagcttcaaagatccccaaaaagaatctaacagcaaccaatcctccgaaactattacatgctgccatacacatcaatataccaccccaaatacctaaacaaattgaaacaaatttaccaattttaactcttggaattaaaaagaaacaaataaattcccccaaaagataaccaaaataaaagacagatgcaacagtagagaactgacttccaactaaatgagtatcttgtttaatattataaacatttgcaatacctaaggcatttttatccaggaattctaagaatgcaattaagaataaatttgtacagataaataaatcaattttccataaaactttccttttaatagatggattttgttccatttctgataaaagttgatcctcttcatcctttgaactaaataagatagtatttgttgattgtgtgtttactgatcctgtctgaacatgattgtcattttcttcctttacagactcaaagctttccattgaatttctcttgctttaattaaaattcttacactaatataccacaaaggaagaatagcagtggttttatacactttgacaccttctgatacgatatggatgataaccacaaactttgcaacaaaatcgccactcagggtcataatagcaacaatgcaattttcaatctcgggggttccgaaatttttcccgaattttttttccagtgataagaaatttcagtttcaaagaggtgtacaccgaacaattattgtattacctgtggaagccacagttttattttttacatggaagttgtatatacaatacagtcaatttcacttcatgacatgtgttcttctgtagacaactatgacttcaagtacagaacttaatggtgatcactcatttattgaggataaacgtaatgagaatatcaaaattggtataagggacggtgttagtttaaaatttgaacttttcccaagaaatgaagctaaaatatcagttttcgattcatcagtacttgtaggtgacggtatatgggaaggattacgtgcaattgatggtaatattcaatacgtttatgaacattttgaaagattatttcaaactgcttatgcattatggattgatttaggtgtaactaaacaagaattattagaattaatttatcaaacaattgatgcaaatgaaggtatgaaagatagtaaagacgttcatattagattgatttgtacaagaggtttaaaatcaactccttatcaatcaaggaaagttaatattggtaaatcattaataattataattccagaatataagaaaattgatattaaatcatatgatgttggtattagattaatgacatcttgggttcgtagaggtaattcagatactaaggatgaaatgtggaatcatttatcaaaggcaactgatgttttagcaagtatgtcagctgagagtgcaggtgttgatggtgcattaatgttagataataatggatttgttaaaacttgtaatgcaactaattttttcattgtacgtaagggtgaattatgggggtcaactagagataatcaaatgcatggtattacaagacaaaaagtacttgatttagcaagagatgcaggtattgttgttaaagaattaaattttacaatgactgaagtttatactgctgatgaagctttctgtacaggtacaatggcatcacaaatgtttgttaaacaagtcgatggtattcgtattggtaatggcactgttggtcctgttactaaacgtattagtcaattatacaaagaggatgcattgagagatgttcatacatcaagagaagatacacttaaaagattagaatcataaaggattcgaaaacggggtttttaaactgcccgcctacttagattgtctatatttttttattatttcttaattaggtaataattccataacatgaaaatcaaattatttcgtgtttgtttttataatttcattaatcgatatattacacttcttttctttgggtaatgagtaaaacaccacatggcacacccagtagaccacgccgtaggataagcggtaaaggagctgatgctaaatatttattttcatctccatatgggggtaaatcgccatttcccatgccgattttattacctgaacaatacaatgaaggtacccaaatagataaacaaaatgagaaatcacatatagaaatattcgataaatctgttgttaaagaactagagataccaccagttggaacagaaataactaatcaaccatttttcaatgatgaaatgagaattgattttttaaatggattgaaaaattttgaaaagcaaatgaataaattaaatcaaatgaatagtacagttgttgaattaaatgaatcattaggtgcatatctttttggactttatcaaaatgcttggtgtgttaatttaacagatagtggagaatttattgaaaaaatggaaaaaatcaaacaaattaataaattaaaggatgaagttgaaaatttgaaaaatcaaataaggttgaaaaaagaggaagaaaataatagaaggaaaagtactatgccacctccatctatccctagattatcaatgattaatcgtccatcattgactggacgagccggaaagagagtgtctgttcaaacgcatcccgtttctaaaccaggtcctaagaaatcatttctcaaagctggaagtcgaagtagggcatggaatactagtacaaataataatgccattacaaaacctggtagaaatggacttggattaagtattgattatgcaacgaagtttcaagtcgatgattcagttgatagtatgagtgatacaagtgaagttcaaacattaaacactatacgacgtttacaagagagaagatctgaaaatgttttcacacgtgttagtgctagaagtcgtaataatagaacagaaagaaatagtgaatcatggcaagttaaacataataaaccatttaggtagaactgtatagtaataatttaattttttgatttaattcttaatttttaataatttatagatgatttcactatgaaagacatatacaagtaaaggaatcaagtgtatacactatagaaggaaagaaaaagatgcaacaaaaacaataatcaattaaggttttggaatatgaacagattttgaaatcattaaacaaccttgtaaaacgtaaaaaaatgaaattggatgccattcataaggtgtaccttcccataataaaccaaatggtaaattatcaccaatcatatcttgactaattaaataagatagtacagaaactaaccaaagtgaagttggaattgggaaaccttcaaaatattttgatttacctgataaatcttttggtatattattaacagttacattgaatcttgctaatctacctaatccacataataccataaatactaaatttaaagtatctgcagtagtttgcataccagaacaaaatgcaattgcagatggtgaaacaccaaatgatattaaatcagctaatgaatctaattcttgaccaatcattgaagatttatttcttaatctagcaactttaccatcaaagaaatcaaagaataaaccaaggaatgtgaaaaaaatagcacgttgtaaataatgagtttgtgaagttaaagtaaatcttaaacaagaaattattgaataaaaacctgagaatccattaagcattgtaatacaatctgccatatgtaaatttctaataaatgataaatgtctatcatcagtagtgaaagctcttatttcatgttcatcaggaggaggtaaaggttcctcatgaagtgagaaaattgatgacattgatgatgatcttctctttaaaggttgaataccagatgttactgaagttgttaaattttcagattctgaatcagatataactgcactatcagcggatgctaatggaatttcattttcatctgataatttactcattcttgatggtctagatgtcatttaattgcaacaattggatgtaaattggaggaaagaggatatgttaaataaatacacattaaattaatttcacagccaaaaataacctttatccgtgttgctactaagtgatttgaaaattttattatacgcactgtaatagttacacagtgttttttgcatgtgcaattttatttgattattacgtaatattatacacattataactataacataactaacctcttacaactgcatcaatacatttagcaacataggcaacattaccagggttaagacctgcaattgatgcacgtccactacccaccaaatagacaccatgatctttttctaatgatgcaacttgttcaggtgtaagaccagtaaatgagaacataccttgttgttcagtaatatgattccaagtaccaggagtttcaaggcgatttaattcattaactaattcttgtctcattttaccaatacgtgaagacatggtaattaaatcttgttcccattgtttataaagttctggagtatttaaaattttagaaacaattttagcaccataagcaggaggatttgaaatttctgatctaataattttagataattgagattgaattgcattttgtaaaatttcatcatttgaaggtaaaacaacatgaactgcaccaactctttcaccatacataccaacatttttagcaaatgattgacaaattaataaacctggaaattgatattttgaacccatattattaacagcttgacgaactgcccaagcatcttttgcaagtgaacctgatgaaaaaccttgataagctgaatcaaataatggtaaatgacgttttttagaaagtgcatctaaaattttactccattgttcctcatttggatctaaacctgttggattatgagcagttgcatgtaataagaagacagaaccttcaggtgctgaatcaattgttgataataaacctgttaaatctaatgatttagttgaagtattccaataaggataagattcagtttttaaacctaaaacattgaaaatttggaaatgatttgcccaagttggatttgataaataaattgttggtaatgatgcatcagctgactcattttcacttttatattgatttttaagaaataaacctgcaacatgtaaagcaccagtacctgataaactttgaattgagactaatttattttcagaaattgcctttgaatcatcacctaagataactcttgcagcagctaaagtaaatgaagggaaacctgaaattggcaaatattcatgattataatcagaagaattttgaagcatattttcagcaagacgaactgaaggtaaaatccaaggtttaccattatcatctctataagcaccgatacctaaatcgactttatttgatcttaaatcttttgcatatctagcttttaatccgaaaagtggatcagctggtaattgtttaatattagcacgaaagaaacctcttgacattgtgttggagtcgttagtagaaatagagttagaattagaagaagaagaagccattgaaatgtgatttataaatggccagaaattgatatatggagatagtagaccctttaaatagattgagttcgtatatcgaaaataaaaaagactccaaaatagaaatgactcttgattattattaaaccttttttccattatctccacattgagagtcatgccgaaaaaatagtttgaaattttaaattaagtatccaccaatggatgattcatttacgtaatttacaaagataatacaccgggattagtcttatcgaccgtggagtcatttacatttacagctatttttatttttatttttaaaatacccgatatccgaaatgtaaacagtcaagaaattacgtaatacccgattttaccctacttttctcaaaatgttttttttcactcaattaacactcaaaatggaaaatttactattaacagcatgaaatcagaatgcattaataatcttgatcttgatcttaagcttctattttgatcttgattcttgttaataacaaccatttacccttcttggaaagtagatcagtaaaattatggatcttttaggtgatatagtggaacatccaaccgagaaaccaactttaaatgaatcagtaaggcctgcagttattgcatctgctaaaaaaccaagtagatggaaacaaagattacaacaaaaaggtataaattcaatgtctggtgttgttcaaaatgaaaaaagtaccccagaaaaaccaacttcattatttactaaagatgaagatactaatatgagaaaatttaatgatccaaaggataggaaattagattatactggattatctgaatctgaacaaattcatcaagaaaatatcgaaattttatcaagaatgtcaactgacgaaagggaggaagctaaacaagaattattggattcattagatcctcaagtattacaaatgttaatgcgtcgttctgctaaaaaatatggtaacccaaatgataaatctggaaaaggcgatgatactaaatatgatataaaggatgatcctttttatcaacctgttgaagggtcaatgggtacttgggttggtggtgaacatgaacttgatagagaggaacaaataaaggaagtaccaattgaaaaaatgagagaaactgtacaaattagaaaacatgcaccacccacaattaaaacatctagtaccacttccactacagcaccacttaaatctgcattgaaaacatcagagagtattgatgaatcattaaatgaaacagtcgatgattcaaaacctaaaaagatacgatttagtaaagaatctaaagttatttatcttgatcaatcagaaaaagttaaacaagatactccttcaccttcaaattctgatggtgaatgggaagatgttgaagatattaatgatcgtactccatctcctgacatttcattacctaaaattgatgatgatgcggccccatctattgaagatgcaaagaaattatgtaatgatccaactcatgaccatgatcacgatcatgaacatacccattcaactattcatttccccaagccaactcaaccatatgaggaattagacattaatgatcctaaatttaatgataaattatacgagaaatattaccctgatttaccaaagaatcctcaacaattagaatggatgaaaccaacaactattgatgatattcctaaagagattgaatatgattcaatagaatctgttagattcgattttaagggtaacattattacaagtgataatattggtgattatttaaatgaaaatcaaggattatttaatcattcacaaaatcctgaattacctggttatacattacccgaattagcacattatttaagatcaacattcccaggtcaagtatgcatcgcttgtcgtacattaggtagaattatgtttaaattaggttcattagaatatcaaattaatgaacaaatagatgatgaatcaaatattaaaaaggaaggtactgaaggtaattttgaaattgaatgttggaaattaattgatcaactgaaaatcattcaattattagaagtctattcctccgataatcaaaaaaacctatcaattaaaaattatgcgatcgatgctctttggctatggaaaaaatgtaaaggtgatgaaaaaataaagaaatacagagaagataatgaatctaaacaatagtttaataaattgtaatttataatctaaatagtatatattttttttataaaaaactcactcagtgactgtagcaatactaactttattaattgtggaatttaatctctcatctctgataactttataataatgatcagtaaaatcaactgcattcatacatcttaaaaatttttcatcatgtgtaattataattaattggaaatttttttgagctgatctttcctttataattgaatgtaatgatttagctaaactttcaatattttcatcatctaaattagtcgttggttcatccaatgcaatcataccaaaatttaaacaaaaacattcagctaatgcaattctaattataattgatgctaaaactttttgtccagctgaacatctacctctcatatctaattcagtaccatttttaatcataacaacacgataattatatgatctattattacttgcaattgaatcagtttgcttcttcattgaaattggatcagatttaatttttatcgtttcaatatcattacccatatatgttttcttccataactcatcaataatattattaattttaagcatttgtgtttgatggaattccataaccccattatctgtcgccttatataaagtcgttaaatcagttgccaatgctaattttgtctgtaatttagaatattcattactatatttaacatcaatatctttataatctcttgaaacttcatctattaaatcaactctctgtttgttcaattgtgtaagctcacctaacttcacagcataatttttctgatatgactgttgtgttttctgtaattcattaatcttaattaaatattcttcacgttgagctaatgctttcttcatatctaattctttgatttgttcctcaattgttattaaatctgcttcatactgtaataaattaagattggctctaatatttctttcttgattattagaatcagccgacagtaattccaatcttctaagttcttcattatttttcacattttcttgaaccattctctcaatcgtacgtttcttgttctcaatactttgaataatttcattgatactaacttcagatacagttgcttcacttacttcaatttctttcatgatttttataaattcttgatgatatctttctaaaataatcagcttgtcatcgaatatctttatctcttgatctctatggttagtagctcccttgagttcaataattatactttgaatttgagaatcacattgaactatatttggttttgtatcatgaattctcgaattaagttcatcaatttcttttttagtctcttcaattaatttctctaaattaacaacatctaaggatttcaattctaattcattaattgataatttcattttatttatatcattctccaattcgacctttttattatatttcagatctttatcaatttgtagtgattgaatttcagttcttaaccgtttgatttcattgtctaattcaacttctcttttctccaattgagaaacatccatagtcgaatcattattggataattgctgttctaatttataaatctcaccctcattctttgatatatcattcaatgctctagtatatttcagcacatcattttcaatactcttcaacatcttcatttcatcatccaaactttgaaatttacttttaaatgttttcagttcttcttcatgattgaaaacatctctctttaagtcaacttctttaacatccaattcaggtaataacacttcacgaatatccttaattgtttgaacactgttttggaatgctttcaattcatcaacacattgttttttaatctctgtttttggatcattatttttctttgatgataattcatttgtacgtatttccaatatttcgagaaatttagataattgaaatccatcatcaaatttacgcttacatagataacaaatatgttttttctctgcatgagctattgcacgtttattaaacattgttaaaaattgaatatctttagaatcttcaagttcttcaatataattatcttctatattcttcaatgattctgtatattcttctaatttaagttcatctccatatatggaattatacattttttgtaattgcatgaatttggaacttaattcagataattcaattttcaattgatttctttgttcagagatatagtgtctgttcattttggctttggaaattttactttcaacattgaaaatcttctcattattcaaatcaatttgttcttgaacctctatgatctcactagaataggtgttttgtaaatattttgtaacttcatgaattggttgaattttatttttaacttctataatttcattatttgtacgatcattaatatctttcaaaaattttattttagacaacatctcagaatcaaatcttgataattttaatttattcttaatagaatccaattcaaattcatccttcctaataagatttgaattttctgttaatttattgacaattttgccaacttcatcattcgaaattatttcatttaacatttcttgtttattttccaactgtttacgtaaaacgactaattttgattgattttcaggtacatttgcatattttgactctaattgtgataatttacgcatattattattataatcagtagtcatatattcgacttgttgatgatatttaattttcgtttcccttaccctctccaaattagcattaataccatcaatgacttctttgtaatgatttgatctttgattcttatgttgcgagagactcaattttgattctcttaaagcaatatcaatatcattctcaaccttactaggatctattaactttttatcatatatttcatgttcaagatttttaagatattgtttctttctatgtatttcatcagcaattgctcttttactagccaaggtaagattttgagattccaattcattacgattttcatcaatttctttggtataatgttcaatttgttgtttcagcttgttaatatgattcaattgatttgcaattgtatttgtaaaattatttaaatcatcttgtaaagcttcacgtggtttattcaaaggttcagttgtaagtttaataagttcaatatttttcaaaagtttttcatgatcatgtttaagtgattcaattttagatataactctttcataatcctgatttgatgtaaataaagttgatagattttcattaattttttcaagtgatgtctttactgattcaatttcatcattataaaattcaatttcatttgataattcattaattttagattttttcaaattagacttttgtttatcattttgtaaatgttgaacattattattaattaatttaatatcactattaatttccttgttaattgattttatagaatctaaaattttaataaatttagaagaatcgaaaatttcatcaaattttttctttaaaactgaagattcagaaattggccaaaaactatcatcttgatgacaaaatacaacataattaagaattgattttgatacacctaaatgataaggtattaatttttcaatatctgcaattttagaactaattgtttgcttttcaccatgattaattgccattaattgattttcctttgttttaaaattaattgaaccagatttaatatttttacttgacattaaacttttacttaaaatcatattaatatgtttattattaacaaatgctaatttaatttgagcctttgtttcattagcattatgtaaattaggatcattaataaataatgcaccatttttagtatttggtggtaattcatttgtagttgcatatcttaaacattcaataattgtagttttacctgatccatttgtaccaacaattaaagttaacggtttcccaaactgtatggtttcctgagtttcatctgaaaatgatctaatcccactaatggataacttatagatactagacattgccacttcagaagcaaattgagctgagcatttaatacttaaagtgccctgtcatagagaaaagacccttacgcgtagtgaataattcgatttgatttgatgtcgcggtcgctgcgtcgtttgagattttctgaaaattttccactgggttcatggacaatagaaaatttatgttctgactcttttaactttggaatcaaatgacatgtttaaaattgaaaataaaagtctggaaattgttctacagatttgcatatctgttaatgcatcttgggaaagttcttttacaacaattggtcaagatgagtgaaagtactacacaacaagcacaaaatacatggatagttccagttactgaaccacgtaaaagtgttttaaaattatataatacattaactcatagtaaagtaccttttaaaccaattaatgaaggtaaaattaaatggtattcatgtggtccaactgtctataattcatctcatatgggacatgcaagaaactatgtatctattgatattaatagaagaattttagaagattattttaattatgatattacatttattcaaaatgttacagatattgatgataaaattattattaaggcaagagaggaagaattatttaaaagatttattgaaaaagttaatggtaatcttaatgaagaaattttaaatgaaatttggtcttcatgggatcaatttgttattaaaaatgttaaatataatggatcaagagatgaatttggtaaatggtttcaaaatcaagatttaattaaaattggtattgaagatcctaaattagttatgtatatgaaaggtgcatttaaggcatgggaatcattaaatgatgaatctaaagcaactgatattaataaatttttagaaaatactaaagatgttattgtaccagttttagatgaaaaatataaatcaacaattacagatcatagtattttccgtaaatgttcatcatattgggaaaaacaatatgatttagatatgaaaaaattaaatgttagagaaccaagtattattacaagagttagtgaatatgtacctgaaattgttaaatttattgaaggtattattaataatggatttgcatatgttagtaatgatggtagtgtttattttaatacaagtaaatttgataatgattcaagtcattcatatgcaaaatgtcaaccatggtcaaaaggtgatatgagtttaattgaagatggtgaaggtaaattaagtagtaataatggtaaattaaattcaagtgattttgcactttggaaatcaagtaaattaggagaaccatattgggaaagtccatggggtaaaggtagaccgggatggcatattgaatgttcagttatgggaggtgattttgttggtgaacatatggatattcattcaggtggaattgatttagcattcccacatcatgataatgaattagcacaaagtgaagcatattttgaatgtaaacaatgggttaattatttcttacatacaggtcatttacatattgaaggacaaaaaatgtctaaaagtttaaaaaattttattacaattgaagaagcattaatggaacatagttcaagacaattaagattaatttttgcattagttccatggaataatggattagattttaaaaaatcattattaaatgaagcaaaatctattgaaagtacatttgataaatattttagtaaaattagagcattaattaatgaaaaggaaggatgtgaatttgaggaagatattaagaaatatggtgaagaggagaaaaaattaatggaagattttgaaaaaatgaaagatattattcatgatgatttatgtgataatttaaatactgcaggtgcaattagacatttacttgatattattaatttaaataatatttacattagtaaaaaggataataaagaaattagaattgatgaagtaaagagaatttgtgaatatgttagtaaaatgcttggtatatttggatttgaagttcgtaaggatggatatggttgggaagtttccaatataggtgatgttaatggtgatagtggtaataataataaggaagaaattattttaccaattgttaaacttttaagtgaatttagggataatgttagaaacattggtattaagaagaaggatgaaaataaggaaatcagtggtattattttaaagatgtgtgatgaaattagggataaattagttattgaaggaggagttggattagaggatagagaaggtgaaaataatggagcattaattaagatgttaagtagtggagaaattgaagaatatagaactaatttagaacaaagagaagcaagagaggcagctaaattagagaagaagagacttgcacaggagaaggcagctcgtgaggaagctgaagagagatcacgtgcccagattgaaacaaaggatttatttagagatagtacattatacagtgaatgggatgaagaaggtgttccattaaagagtgttaatggagaggaagttagtaaatctagcagaaagaagatggtaaagcaaatgacacttcataacaaactcagagagaagtacggtatgtaatgtatttaattgtataactataagtcttcatctgaaaccaccgaaaaaagaaaagatgtccgtacagtttttccaccagtaaattcacccgggggatcactgggtgatctaagcggatgatccgttgagatcagtggggaaaaatagagggtaactattttttctcactttttttggaaattggtgaaaaaaactggaaaacttgaatttctccatttccaattcttccctccactggaaatcgttcgttttcttctttttttttaccgttttctttccctattgataaccatatatcatttaacaaacatgcctgcatttaattttaactttagtgctgatctggcttgttattcattatctttaaatcaacaaaatgtttcaaataatcatttaaataaaaagatttcggactcttcatttttaacctccggacattctacatctcattctccatcgtcaaatttaaattcaatttcaaattcaaattcaaattcaacttcaaaacttgatttacttattcatactgcaactaatacttcaaataataccccatattctaataactcttcacctttatcatctcaaataccgctaaatccggttaaaacggctcctttatcaacttcactcgatatcctctgtttgcatgcacaaaatgaacttaactcacattttgtgaaaaatgaaagtcaaaacagtagtaataaattagtgaaaaacatcagtaccaacaataaaggtaatactgctaataaggttaaattagagaaaaatataaaatctaaggatatatctccaaaggaaaataatagtaatattaccaaaggtggtaaaattacaaaagaaagagttagaaaatcaaagaaggaaactccatcctcctcctcctcctcctcctcatcctcattatcagcatcatcatcatcctcctcctcctcatcatccgcttctaatatagctattaaactggcatcaccttctattcatacaaagagacaacgttcaggtccttcttgtgattgttgtagatcaagaaaaattaaatgtgattcagaaattttcattttatcaactttatcaaatataccatcatcatcaaataattcaacaacaactgttgatgaaaaacataattctcatattgctcattgtcaatatatttcaactgatttattatcaaattatcaatattatcaaattattaaagatgaagaacattcacttaataataaattaacttcatttaattatttacaatttaaaccttgttctgcttgtttatcgaaaaatttaaattgttcattctcaaaaggttttacaagaaatgatattgttaaatttaataaaagtgaaaaattcccaacaattttaaataatcgaatagatgatcattcattaccaactccttcaccttcaattcaatctccaatagattcagatattgatattgatgaaaatgatcaaaaattaaataaattaaaacaacaagaacatgtaaaggatgaaacaatagaaaatgaacctttaattaaggaaagaaaatcttcaaagaaaacttcttgtaaaacttgtagatttaaaaagataaaatgtgttaaaattaataataatgatttttgtcaatattgtcaaaagaagaatatagtttgtctttttgaatgaatgataaaaaaataaataaaaatattttttcctaacttaaatcttttctaaaattaattctttacttaacattcaatttacctttgtatataattctcattaaatatatataaaactacttattataaagctaaaataaccttaaacttaaattaaaaatataattttctaaacttttggtggtggaggtggagggggtgctttctttggtggcacacctgcagttacctttgtttttggcggtggtggtggcggtttaacagccggtggtggtggttttgatgtagacggtagtggtggttttgatgataaaggtggtggaggtggtttagaaatcggaggtggtggtttcactaacggcagttgaggtttggtagttgttgatgttgatgttgatgttgattttgatgtaggtttggtgaatggattaggtttagtttgatatgattcttgatacggttgttgaggatgttgtgtttgatgaccttgtggatagtatgattgtggatattcatattgttgtccataataagaatcttgatacccgtattgtgaatattgatattgttttgagtactgttgatgatattgctgttgatactgtggtggatattgctggtagtttccattgtatgattgtttttgataaccagaatgttgtcctggatactgttgtccctgtgattgcaaatgatcatattttggtcttttattactctcctctttttcttcaataactctcttttcaacagtactatctccttcacctaattcattcataaaattttcaaattcttcatccatttctttactcttttcatcatcaattttacaatcttttgttaaatgtccaacattaccacatttttcacaaattaatttagttgtaaaactatcaacatttttacattcattaccaatatgtccaaatttcccacatttttcacattttggttcagtattttctctaaatgtaccattcaatttagctaattctcttaattgatttctctttaaatcattttgtccaacgggtgaaaaaattgctttattcataatttcttcacataattttttagcaagttcaactttttcaattgtatctgcacttattaaacaatgtaatttttcttctaaattatttaattcaggtgaaatattttgaatatttttaccacctttaacactaccttgacctctaataccaattttagcaccagaatcttcttgtaattttttcaatgtattacctcttggaccaattaataatccaataaaattaatttcaggatattcctcattcttaatatataatttatcaatatatttacttggttttggtttataccattcaggtgccttataagatggaactaattctaataatctttcaacaagataatttctctcattttcatatttccttttatatcgtatttcccttgtattacttcttttaccattattatcataaattggagcaggtgatggagatctatccctctcattcatatgatattttaaataatctttactctctaaaatttcacaaatttcatgaattctaatataacttgtataagcttcaatttgttcagtacttaatgaatttaatatatttgttggtgtaggtataccaggattatagaaaaccgctttagaaggttccccactcaatctattatctcgttcccttacacgacctctctccattgtcatcccaatgtcaatgtcttcctcttcctctaagaaggaacacttaacttgccatgttaaagcttattaaacctatacaaaatcaaagtcgacgcagcgtccgtgaaaaactcaaaattttgaatattttcatctcaacatctcaaatttatctctccttaactataaaacttagctatatactacttcactttcccctcattgaacaactagacaaataatggctattcaacaagttagtagagttggaggtccaaacagatgttttggtacctttcaaaaagcattagaatgtatgactaacgaaaatactaagagtaatgatgaatgtaaagctttcatcggtgattatgttgaatgtagaagacataaactggaaacttataaaatggttattatgcaacaacatttagaaaaggatagatctgatttagatattgaaaaagttggtgctccttatgttaaaaagagagattatttaactccaaagactcttggtttagttggtggtgatgatcatgcaattgcaacttctaaattctaaatttattacttattcttttattcttacatttctcctatattattatattatgtttcatttcttttaaatactatttataaagataactatttattattcaaaaaaaaatattaaattatacttactctcgttaaaccttatgcttctataaaactaatataaaggtcgacgtttacgaccccatttttgtcttaaacttgatacattaatctcttcaacaactaatccatcttcattaaattcaactttctttctaattttaccaagtgtattatatctttcaccttcaggtgtagtatttttattatttttattactataccattcactattattattatttattaaaccaccattagattttttactacctttactaaatgctgaactaccatttgttatactacttccacctgcattacctgtaaatttaccctttttactatcaataactccttcattgaaatgtggtgaatatttgaaaacttgtttattataaagtttaccagaatctttaacattttcaagttttttaacatattcaaatgattcatttaaaattttataaactgaatcaaatattaattgcctaaattgataagttgttaaaccaatatctcgataaatttgtttactcttaaatttaatcttttcacgaaatttataagtatattcttcatttttaatagaacttgtaacattattttcctttttaaaattttcataacttaaatgtgtattccatatactaattataatttttttatttcgaacactaataacaatacctgcaatatcatccataattaatttatttaaatctttattactcattgttttattacattcaatatcttcaaaatcactattatctaatgcctcctttgataatggtaaagaaatttcatcatcaataaatttcccactaactaattttaataataataattcccaaaatatacttaatgctaatctcttaaatttatgatgactattagagaaactaaatgaccatctaccaccatttttgttcatttcatcttcccataatggttttataccatttttaaagaaaaaatattcagtatcaattgaaacatcttcaatatttttcaaattagagaatgaaacccaaaattgttcaattgaatcaacaatttcagtctcctcctcttctccttccttttcattatctttattattcctactaagattcacttttggaaattttaaaatggtagtatcctgaagatactgtgcatctcttttatctatatcacttgctgttaaattcacacttgtatcatcatcatttatattttcattttcattattcactatttcattatcatcaagttcatcatctttctcttcatcatcatttccgtctttttcttctttttcttctttttcttctttctcttcttcctcttccttggaagacatacgtaaatgttgccaaaaagtccaatcataagataatttatgcaatgtcggttctggatcttgactcatactcatatttatagtattattactgttattcaccacattagattgtgactgtgactgaaactggttaagaaaccctgaactatcaaatattctagacattataccccctagctatactatacttccttccttacttccttccttacttcttcttcttcttcttcaatgaaaagtgcaaaaactgacactgtggaaaactcacatttttttcccagtcacacaacaattagttttcctcgcttattcttattatgttattctttcacgatggctcttcctttgacaagggaggaatgaaatgagcctttctctaaatgtacgtgattatgatgggaatgtagtaactgaagagtatcccagaatcaatgattgtcaagggactattaattatgaaggttatcagaaatacatcgaagataattacaaagatttacattgtatggatttaaaggcatatgtgaaacatttagataattaccaagaattaatattgaaagattggcaaatattaaactcaattcatgttcaatgttatgttggattgaaaaatcctgatgatatttgggatagtttatgtaaacgaatttataattttggatttattggtaattattcacgtatttgtgataaattagagaatggttataattatatcttaacatttgatgaatttagtcatatttatccatttatgagaagttgtattggtaatgctgcaagtttaagaagaatgaacaatttagaaaatctcgatatcaaaacaaatgatgcaagtaaattatttcatgatgaaaataaatttgttaattttatacataaaatacctgaaaataatcaaaatttgaaaaatataacacttttgaggagaagtgtatttaatgaatcaagaatttataaaagaagattgggtaatccaccaggttctgaatggactcatttatcaattgaaaatgatttagttaagttaactgatagttataggaaaaatattgaaaataatttacaagatagatatggtgtttatgaaaaatatttattttgtgttaataaacattgcccgggaaaaatgaaaattatattagattgtattcataatgttgttataatttcaatgattaatacacattttagatgtttagaaactcataaacgtcatgttttcgatatagttaggaagttattcattatacataatgcagatttagaattgattgataaactgtatcgtggtatacctagaaaatatggattaacatatgttgaagcatggacttcattagatgaatttaaaccattaatattgaatgatttaacaccaatttttttcaattatgatcataattataaaagtaatggagaatttagttggtcaagtactaaaaagagaggatctattttagattttttcaaaactgatggaattgaagaatctgattcaaaacgtaggaaaattgaacaaaagaaaaaaaatactattaataaaataatacttgaagatcgtgatatacttggtattaaaaattgggaatatgatttaatcagatatgatcaattcagtaactttattaaaagagatgaatgggagtttcatttaagtgaggataaacatggtaaattaagagaaatttacagaatttggaggaaagattattttgaaattgaagattatttaactacattatttggatcaaataatccatattcatttgtttttgcatgtaataaattaataccaaataaggttgaaattaataattcaatattttattgtgagaataataaattaaacgatgtttcaattgatgaaatttttttaaatataatgaaatataatcaaattaaatgtttgagagagtttcaattaatcgttcaacatttatacacaaaatttagatcaattaaagaaaatgttcatcaaattttgagaaatccagctaattatattacaccatatccattaaattcaaaattgaaggatttacctgaaataaatgagaaaagtatatcatcagcaaaggaaatgattttcatttgtttatcaaatgaagcatttattaattcagatgaaattataatgtatgatatttgtgataatgcagtaattgaaccaattaattcaattggtttaggttataataatgaaaaaatacgtaaacttaaacatcaagcacatataacgtcatatattaaacaacttgaggaatatgataataattggatgaatagtagatgtattaaagaatgttattttactggtaatcctgaaaataaaagtccgtatagacaatcaaataagaaacttatattaaatagaaaaatggatagacttgaattatattctatttataatgattataaggataatggtaaagaaatcaataaagctgtagttttcaataaggagaaacatgttgggaaattagattatgaggaaagtttaaaagttattttcattaaatataaaattgatgatgtttatcaagatgcatatttgattataaaaaatattgattcatattttattaaagttttcattgagaaattattaaaggataggataaaacctggtacaccaaaatttttcaatttaacagatgataaatttttacttcaaataagtaattgtaaatgttatacatttaatcaattttatattgataaattttacaaatttgttaatccgattagtaaatataaacttttcgaaagtattttaacaaaacaatttgatgcaaatgatttaattcaacaaaataaaatttatttaccaagagttagaatgagagatattgataaatttgaattgaaatcaggattaagaataattgcaagaactgctggaaatgcaagaaatataattaaaaaggagaatgaattatttgaaaaattaaatactttaagagatagatggttagataataataataatattccaattccacatagagatagtcaatcacttgtagataggataaggtatacatcatttatgattaaagaaatggaattaaatgaaactgagagagggagttttattaaaatatttgaaatgttaagggaacaagttgattttaaaaatattgaacatttccaaagatttccaagacgtaatattgttgaattagttaaagagttaaataagaaagttatgtgatatatgtatatgtaaactatgtaataataaatagaggtaagatagataaatataaatataaaatataaagaaaaggattcaaaaataataacgagtatattaattaaaagatagaaaaggtgcccggatatatgaaattaaatttattttacatttcagataatgttgttgcataactttcaggataatcacaatcagtataatctaaagcacctaaatcttttgttattgaatgattagtattattattattattaatttgattattatgagaagttaaaggtattgcatgaattgaatcatctaaatctgatgaacacgatatatcatgagtattattattatttattatatttttattatcatttattatattattaatattatttcttgaagaattattattatcatcatgatgattataatcataatttgaatcttgtgaagcttttgtaccaataactgaaaatttaggtttttcattatcatcatttaattcttgattttcattacgttcataataatcaatttttaattcatgaacaatatcaaaattttctgctaataaagcagtaacagttgcttgaccttcaggaatttgacccttgaacacaaatttaccatcaattttcatattatcaattgaatctaattttaattgataaggatataattccctaattgatgaaataccacccattctctttaaatctaataaacatcttctaattgttgataattgattatgaattggttgtaaactttcactaacaggttcagaagattctaataatttataaataattgcaaaacatgatcttaaaaggtaaagtaaaacagattgacctttaaaatctttattaataaaataaccattaattcttgaattatcaatttcaactaattgtttttgataattaaaaatatcagttgttcttaaagtccatctctttgttaataataaattttctaaaattgattttaaatttaataatttttcataaattgaagttaaatttggatcaactctatcaattccaagatgtaaatcatttaaataatttgaacaattatcaattaaaccttttataataccggaaccttttaaattttcatcatttgaaaaaatttcttctgctttaatttgacaattatttaatttataagataattgattaatttgcatatcatcatgaatattttcagttattaatttaaataaattatatttaatatctaataaattatccattaaagattgaacatcatttgataaatctgaagttttatccatcataaaattatattcattataacaaatatttaattttttattaagtaaagaaatttcagttgaaatttcattattatttaaagaatttgaatttgaattattcttagtttgatcaataattttagaaatttcatttaatctatcattaattggttttaaatcatgaggagtataaattgaagattcatttaaatgttctaataatctttgaacagttgataaagaagcataagttgcaggagctgtgtttgataaaccacaagttacaaagcaaagtgataaaagttgaaaaatttcatcaataagtacatcaacattattaatattatcatcagtaatagtatcatcaatagaatcttgtttaccatcagattttctaattttatataattcttcagtacattttaaaacattttgataaatttcagttatatcctttgaatccataaattttgaatgatctcttttaataactgataatttttgtctatagtcagttaattgattgaagatagataattcattatcaggtatagtatttaatctattagtcattatatatggttcaattgaatatagatataagggttaaattcaagaaaagaaataaagaattatcgatatatatttgccattattaaatccattattgttaaatccatgctgtctattactattttgacgacatcattagaaattcagaaaaaactaaggcactccctaaatccgcgatatttaaaataatttccattttgattaggtaagtattgcttatgtaatggtcacgtgatctttttctattacataagcaatacttacctaagaatatcacgtgatacgttgctgattatataatcaaaataaaagtagaaaagcgcgttttgtcctaagttacgcctacctatatacacttactcctactttctagaactcaactactgctataatgactgtagaaaatttacttttcttcatttttttcaattatatattattagactttatattattatcaatcaatttattatctattcataactctactgatattcatatctacataaacaaaacatgcatttagggataatatcgttattatcaatacttctatcaccagtttcagcttcaactaaattaggttgttattcttcaataccttcaaattttatatctcaaggtgaatatacttggcaatcatcaggtcattgtactgatttatgttcttcatatcaatattttgctctttcaaataatatttgttattgtggtaattcatttaatgataattcatcttctaaattgtcagatagtcaatgttcaatagcttgtaatggatttcctcaagaaacttgtggtggtcaaggagtttataatattttcgcaatggctgataatgttagtactgatagtcaaagtagtactagtgaaactagcagtgaaagtagtacatcatcttcaactacttcaagtacttcaacaacttcaacttctactacaacttcctcatcatcaacaacaacatcatctacagattcatcatcaacagaatccccatccccatccccatcttcaactacaaacaataccaccactacttcatccacctcatccacctcatccacctcttccatttcatcaccaacaacaacaacaactccaacaacttcagtaatagaagctgtacatacatcacaaatgattgttgtagaaaattcatctcaaactgttacttcagtagtttatataactcatacttcaactccaacttcaacttcaacttcaacttcaaatgaaaaatcttcttcatcagttaataaaggtgcaattattggtggtgtagttggtggtgttttaggatttttaacattattatttgcaattttattccttttaagacataaaatttttagtaaatttaataataatgataatgatgattctgaatcaattttagctgatgatatagcctatgaggaagcattgaaatcaaatcctttttcaagtgaagatgataaagaagctgataaaattttattaggtagacgtagattaagtgatggtagtttggctgatacaaatgattatggtatgaaagttttacgtgtggctaatcctgatgatgattaattaaatcatattattattatatgatattacttttcaatacttttatttttgctttatcccccatatcccattcagttcacattcaattcaattcatttcatttccattcatttctcatatcatttttgtatttatatcttttataaacttttactttcatttcataaaatttcatcaatttacttttctgtatttttatttatgaatgtttgtctttaaatacaatttacaaaaagaataaaattttattgtctatatttatttatttatattttctaaattagatatatttataaggatttaaaataccatttggatcataatgtttttttaaatctttcatcatattaatttcagtttcacttttagaatatttaatataatttttcttttggaaacctaatccatgttcagcagaaattgaacctttatgactttcaataaattcataaacaaatggttctaatgctttttcaacttctttattatattctctaactgcaacatttaaatgtaaattaccatcaccaatatgaccataaccaacagcttcatagacaggtttcttattatcttcagtacttgataattctaattcatttaatctctctttaacactttcaactaatttatacattgaatctaatggtaatgaaacatcatatttataaacacctccaaattgttgtgatgcctctgcaataccttctctccatgtccataaagttttcaattgttgttcatcttgtgaaactgtaccatcaacgacaatttctgattccattacatcttctaaaaatttttctaatttaatatcatcatgttccttatttgaaccacttgtctctaataaaacataaaatggatattctggaactgattcaataccttcaatatcatcttgacataaaggatgagttgtctttaatgtttgagctgctaataattgtgagtctttatccataaattcaaatgcacttaaaatttcacctaattcacttttagccttttggaaacatttagtaacttgttcataattttctaaacctaaaaatgcaacattaacagattttggtcttgcaggacataaaattgaaacaccagttataatacctaaactaccttcactaccaataaataattgttttaaatcataacctgtattatcttttcttaatgaatgcattgaattataaattgtaccatcagctaaaacaacttctaaacctaaaactgatccatgtaatgaaccatatcttaataatcttaaaccaccagcattagttgcaacattaccaccaacgaaacatgaaccttttgcacctaaatctaatgggaaaatataaccattttcagataaataattatcagcattttctaaaataacacctgcatcaacttttaaaatacctgaactttgatcaaatgatctaatattattcatacttgctaatgaaataacaatttcatcgaaaactggtactgaaccaccaactaaacctgtattaccaccttgtggttcaacagctaatttacgttgattacaatattttaaaatttcagaaacttgttcagttgtctttggtttaagtactaatttagattgtccaatatattttttcatccaatcttgattataacctgttatatcatttgaatcagtaattaattgatttggtgataaaattttagagaaatgattaatatcttcatcattgattttgccaaaatcacctcttttaatattaggatatttatcagctgttaaagttgatgaaaatctttgacaaagaggtatgttccttgtagatctagtgaataatctaagcattgttggtaaaagaagttgaaatcaaaagaataatgattaacatgactccacaataataaatttcaaactgactctgaaaagctggatttttcagatttccaaaaccgctgcgtcttcctaatatggtaatcttgacacctaagcacatgatataatttagaatttccctttaacaagtccttttctttaaacaatggcaagaaaagacgttaaaggagtaaagaaggtatccgttaaggagatacctgcagtggagaaaccttttaataaatctacaacaaccacaacatcatctaaaatatcatggtatgaagaattatcaaaatcaattgatacagcacttatacaatataagaaagatttagcatcaagtagacgtttaagattaattgatacatttttagcatttttaatgatttcaggtattgtacaatttgcattttgtatattaggtggttcaaatccatttaatacatttttatcaggttttggtgcttgtgttggtcaatttgttttaactgttgcattacgtgttcaatcatttgataaaaatcctgaaattgcatttggtgaatatatttttgcaagtttattattgcattttgtacttgttcattttatgaatcaattagcttaataaacgggggaaaaagatttaattatttatataggatatagtataaatagatttaaatttagataaagtacttacttacttatttacttacttactttaactataattatacaatactcatcatttcgctaacattatcaccattaccatcaccaccatcttctactactataccatcatctaattcttcatcttcatcaccatcatcatcttctccatcactttctctttctgtatcttttataatttcatcatcatcttcatcattaccattaccatttatttcactttcatcatcttcattatcctttatttcaggtatactaaattcacaatttttcaattctaataattgattttgattacgaggtgttgcccttaaccattgaacacggggcccacaaggagcagtttcatgaattttaaaaccaaatattttaagtcgaaattgttccttcgtacgagcttgaacttgtctattaatttcagggaacattttcataaataaacctgcaaaacttgtaccaaagaatgcaccatcaatatttaaatatcttgaagaatttggtaaataaatatcattacaatttggacaatataaacgtacagtttcaacacctggtgaatcaaatctaccaattggtataaaattcatattatcacaataataacgaggacatgaaccaaaacatgtatcttcatatttttcagccattgcatgtaatccttgctttgttaaaatatatcttgcatgtattaaaccatataataattcagctgcatgttcaactaatggtaaatcatttgaatcaacagtagtttcaggttccatatctaaaattaaatcaagtgcttgtctataatatggtacaattgaacctaaaccagttaaattaaaatcatcttcaataaattcaggtgcaacttcaacaaaataatcatgtccaaattgtgtacagaattggcttatccaagtatctggttcatcactagtatatgtttccattgatatataatgtatgttactctaataaaccactatctactactaatctaataaaaataaacccatggtagtaatagtaataatgtatcagcactgcatccatccacactcacgctttttcaaaattttcattttccatattaatattatttattatttttgattttgtactgggtcacttatcttatactatacatactacaatgaactcattagatacagtaactatacttgcaatattggtatttataatatcattattagataaatctacagttaataaatggatatctacaatatttattaaaaaatcaccacaattagattcacttaatgcacttataaatcaacgtcgtgaaattgaaattgaacgtaataaattatcagctcaagataattatgcacgttggacaaaacttaatcgtagattagataaattagatattgaaattcaatcaatttcatcacaaattaaatcatcaaatgtaacatcaactgcaacaatttcaacaattgttacaattttattatcatctccacaatggattttaagattattttatgctaaaactgctgtaatgcatttaatatctggtataaatacatttcctaaaccattttccctaattttaagattcccatgggggaaatacaatacagtgggtgcagtattctgggcagcagctattgatattgtgttaacagctattaagaactggatagtagtgacaaagcagttattaactgtatctaatactaataatactaataataataataatcataataataatactaagaccgacgcgtcgaaatgaaatgaaaaaccataaaacgcggtttttcactctttgtttacttttcacagagaagaattattttattttattttattttgttttcatgacatgaggaatgaataagattttaggtttactatattattagaatctgcaattgttatacatcacttttctgtgtatattcttttcttttattctatataataataacattacatatcacattcattttaaatatagttaatttatagttatagttataaaataatgtcaagattatctacaacttcggcatcgcttgctctatcagctattcttgatgataacactaacaacaacaacaacaacaataataataataataataacactaacaatggttcaaatacaacagtatcctcaatatcctctaaatctactatctctaattcaaataattcaaattcctttataaacattcatgtatcaccaactcatcgtaaggcaactagactgacaatgcaaagttattttgataaggaaaataataatcgattgtcttctaattctgataaattattatctccaaaatctcaattaactcctctgaagcaatcaaatcaaaacttattaaatagacaatcattacctaattcaattatttcttcaaaatcttttaaatcagtttcaactactgaatctgttaaatctccattaaagaggaataatatcaatagaagatcacatttatctcaaagttcaaaatcaacttattcctcttattcttcctcaaaatctaataatgatattaatcatttaaataatgaaaatagacattcaattgataaaacacttgttaatgatcaaatagagaagaaaattttaaatgaatcaaatcaaacgaatagttcttcaactcaaaaaaataccccaaatatccattcaaagcaacaaacagcagatctctcttcattagatgattcatttcaagatgaaactttatatatgcaatcagaatcaactaaatcaataaggaaatcatcttctttccgtactttaagaaattcattatccatgaaatcgttagcttcaacattaaatataaaacaagattcaaatccaaattcaaatacatcatcaaatacattatcaaataataaccctacaaccaaccatccagacagaaggaaaagtttaaatatcaaaatgaaaaagaaaatgtcattggaaaatattagatcatttctttcaaataatagatattcaatgagttatgataattcaaatgattataaaaataatatatcattacctattatgcaacctcaaacaaaggataaaataagaaatagattaagaaattcaacttcaattgtatcaatctcttcatttacatcagatgatcataatacaaccattcacagcaatgccagtagtcatagtactaataatatcaatcataatcataatgatcatcatcatcatcaccaccatcataatagtagcataccagttgatgtcaatcatttaaatattctgttgaaattatgtaatcagcaaaagattatatcatttaaatcatacatgaataaatatcaagcatcaaataacaggaaacatttaacattagttaaaaataatgtaacaagtgataatttaatacttcatgaatttacaactaataataatataaatataaatataaatataaatataaatgatcatgaaaatagtttccaatcagatgttaaatattcaagtgtttggaaaataattccatttgatttagataattcaacaatgagtaagatcattcaagaattagcattaacaattgcaatgtcaacaaaggaaggttttgtttcaattatttcagcaactgttgtatctggttcattacctaattcaataattgatataattgataataattatccaaatttaaattcaaatttaaattcaaatgatcattatcttataatgaaattaaaatatggtggtatttctttaaataaatttaaaattcaatcttggcaagatgcttcaataatttttaaaaatattttaaatacaatttgtattggatcaaatgaaaattatgaacatagagatttaaattttgataatatattaattaaacaattatctaatgaaaatgacgaaagtaataaatttcaaataacaattattgatcatgcattagctcgtggaattgtaagtaatcaattaatgtttagaaacttatttgatgcagaattttttaaaggtaatggtgaatacagacatactatttataaattaatgagacgtgcagcatcatcttcaactttaccaaataatttaacatcatcaacaaattcaagtaattcatcaatatcacattcaatttcaactttaagtattaatacattatcatctgatactaatattgattggtcaaaatcttatccaatatttgatttactttgggtacattatttattacatataatcatttatgaaaagaatttaaaaccaattaaaatgaatccaataatgaaaagaaatggtagatcaatgaataattcaaatgaagttacaaaagagataattgcctatgaaagattattacaaggttatagaatggttgaaccagcagttttattcggtcatcgtaaaaataaatttatgagacatgttaataatgttcatgaatttaaagattggtttttaggtatataaaatttatattaacgttaataaattacattataaaatttataaacaatatattccaaaaatacttaccgaagaaaggacaagacgagtccttagagataaccatgataagatacttttgcaatcagaaaagaccatgatcgcacatgctgatatgatgaccaataaacatgggggaacaattacagtctttaatacgtcaatctaacatgaatttgattggatctattgaaaaaaatgtaaaaaagtcaaaaataattgctggaatggtaatcgattcaacaagctccttaaaagaaattcaaaccaaagggaataatatgttgcaaatgatgactgctttatctaaaaaccataaaaaacgcagaaatcaatgaatgcgatgcttggaaaattgagacaaagggggaaacgtaggagagattgtgaagacgataacgtagaaatggaaacaaggaggtttgttcatattgctattgaaaaagaatatcaattcaaccctaaaatctcatttaatcagtttttttcagattgtttttatggtgatcatcatttatatatgagagtaccaacttaaatccggattggaaaaaaaggaacagagcttcatatttcagatataaacgtctagctaaaataaagagaatttgcctggtattgatgatgatataaatgttagatctaaaatggactcaattattgactactgtcgaaataattccttagaaattctatcgacatcttttggggtagggaaactagcaaactttttaagtggtaccaataagcagctcaatgccacattcacaacgccagaattacgtgagcaggtgctggcatcaatcttgtggaaagcataccaaacatgtgtcttgaataataacgtataagctgtatataataataacattaattataatctatatgataatctatatgtaataaaaattggatgaaattacaatgactcctaaatctattatcaatgctgtggataatttattaccttttgaaaaaaatgtgataaccctttcggtggatgtgttgttgttttaactggtgatttctgtcagtgtcttctggttgttacgaagaatcctactctccgggaagtttttcaaaggtgtgttttgtgctctttgtttgccgatgatattcaatttttgaagcttactgaaaatatgagaattttatgtacatgccccattgaggagcatgaagctagacaagctattgctagaaaactcttagatttaggtagtggtttcaatattgctcatggtgacgggtttgaaaatcttttggatcttggtattaatgaagatcaattttttaaactaagtgaagaaaagaattttttagaagatatttatcctaataatcaactaaagtttgccaaacatttgaaccagcctgaaaaattgcaagctttgatggatttgtatgcatctaatctattttcatgatctatattatcaacctctctatgaacatgatggccaagtcatagaacttctacgtataaacttcaatcatactcctgatgaaagactctctctatcaaactcactgtttgatactaagagacgccttcaatctaagaagattaaaaagaagaagtagtggttaaaaaattaattaaactaaagttgtccataatttttttcgtgtcagtggaagttggaaaaaaaattgaaaatttcaaaacctactcagacgcgtctatttagaagatgagactttgtttacgtttttaatgacatgaatattttattgatctcttgataatctacaagttgtctgatttccttcatttcagtaatacaacacagatatatggagagtgggttacataggctatccctgaatgacctgtctacagtccatgagcaggatgaacgattgtttttggaccattcaaggaaatatgcaaagctgaacaaatacaaagaatcaaaacatcaatcagttgaagaagaaagcggatttgactttgatgatgatttcgatgataataatgattttgataacattgtacaatccaaaattaatggacaacaacagaaacttaaatccactggaaaaaatataatgcgtacacccatttccaataattttataacaatgtcaggtaggaataatagtgtcatggataaacgatctatatcatccacttcttcaagaacttcctcatctataagatctcagtatacggaaagtgacactgataatagtgattatgctcaggaattcgaagactttgaagattttgagaatgatataaaaactaatttacttcaaaaatttagacaaaagcaagaaaaggtaagacaagaagttgaaagaactaaacatgaaaacttgttaaaatatagtcaaatacagaatcgattgaacagttttaaaaattcttcgcaatggaattctaaatattccaactatgttgatgattattcaaatgatgaagattttgaagattttaataattttacgacaagtgattttcaaaaatcatcaaggtttaacagtaatcctaactcaacaatggggaagaaaaaatccatgcctgttctcaaaatgggtacaagtttaaacggatcacctaagaagattaaaaaatatgcatcaacactagatatcaacaacactatcagaaatcaagatactcttaaaagaaatcaattacaaactattagatacccattatatattgatgaagatgatttggatgatatacaagatatggatcgaacaattacattagccgattataaaaaattacaaagaaaaatgcaaaatatacgacctattgatttatctaaattttcagaaactccatcttctaatcacattaaaaaatctcgccatagtaaacatcataaacacgatattaatgaattaaataaaccatttttaactccacaaacttctaaaacttcacaattgacaaaagaagggaaaatcagattaattagatcattgggtaaaccaaaagtgaagaagacattacctgcacacttatacggtgaattatcatatgatccatttttgaaaaaatggtgtggtaatgatgaagatttagctagatttgaatcaattaattattctaaacctaagctaataagtaaatctgaatcaattcctcaatctgttaatggaatggtatatgatgatacaaaattaagatgggtcagtgtcacaggatcttatgaggatgatccatttgatgatgattttgatgacacagttcatatgaatgaaagcgatttgaatccaatcaatcaaagatatgcaagcagtccacataggagtccacataggagtaaaataggaaggttagtgccttcggaatccactatgacattaagtgataatttgaaagttaaatcacattttaaagttacacctgagatgtataaagtgtggaaaaacgaagaggagagatggatacgtaaagttggtaactggttcccagatcaagaagatccacatgctttcaaatacgatttgaaggttttcttgaatcaacaataatatagtataagtaaagcattgtataatattaataggacgattaagataaagataaagataataacattaaatcaattgtggcataatttagtggggctcgtcattccgctttaggtaatatttttccttatcagtggtgctaaatttccgcttttcaacgttttccacctgatgtaactgataaagagacacagtccatattgtgtataaatacctgcagtggttacacattctgagttgaattataagaaaatttttttgagcttattactaggcaataatggtagacaaagattccaagattatattagttggttccggtgttttcggattatcaaatgctttacatttggccagtaatggttacaaaaatgttactgtttttgacagattagaccttgaagcacaaagatttacattattgaatggttcagatacagcctctgctgatattaataaggtgttcagagcacagtatgcagaaaagaaacattatcaagaccttgcttttcaggcttttgaagtttggcaaaaatggaattcagatattcaattactacctgaagaagagaaaaataagtttactgatttgaaattattggatttatgtggttatatgaaacttgatgatattgatgggtgggaagaaaaaaaatctcgtgaaaattttgtaaaggaaggtttaggttctttgaatattgacatctcaaatgaaaatgatgttaaaagagctaaatatttaggtttaggtaataaaatcaattttgccttaaacttaaagaaaaaatacccagaaattcaaggtactttggatttaactgctggtgttttatatgcttccagaactttacaatacgctttttatttatgtaaaaaacttggtgttaaatttgttttgggaggagataaaggtacatttcaagattttatttataaatttgaaaatgttgttaatggtattaaaactaaagatggaaaggagcatttagccgatttagtcgttgtcaatgcaggtccttggacaacaaaactagttcctgaattagatggaattaatgaagcagctgcaggtaatattctaattgcaaagattccaaaagatagaaaagatcttttcatcaagtacaactccaaaaactttccaatgtttggttggaaaaatggtcattctagagaacatgatcatatgggaggtatgttcttgtttccaactatggagccagagggatatttaaaaattattgttagacagacaaaatacactaaccctgttgtcactgaaaacaaccaagttatttcagttccaaagacaaaaaatagcttaccacctttccattacttaccaaaacatattacaaaccaagttaaagaatttttaaacacttttttcccagatttgaaaggtttgaaatgggaaagtagaatattatggtatacagatacaattaacaatgattacatttatgattatgttcctggaaaaaagaatttatttgttgcatgtggtggttccgggcatgcttttaaaatgttaccagtgttaggtcaatttttggtagataagattgaaaaaagggaaaacttttacacaaatttattttcttggaaaaatcatacagaatataaaggtgacccaaatggtttgcaagagaaattaaatagctctcgtgcttatgacaaacaaattatttcggatgctaaagattataatttttctgatgatgtcaagccaaaattatgatcaggtagagaatcaccgtattgtaaatccctacttataatatgttttttagcgatttaagaaaatttccctgaatcctaagtctatggtttccccctcaccagtatctcataaatatcacatttgtagccgcgatttttctctatccaatcatgtacttagtttttaatttcaataagaattgactgagttatggacgtttttagtttcaaatttgcgtttttttacaaagtcctgtaaaatggtcattaaccttgagcacttcggatatggctcattgtattctcctcacttgattgtataggaaattttacgaacatattgtttaccaattgtttagaatttgaaaaaaggttgctaaagttggtaattttttttgtcctctttgtgggcacttatttttgatttttagaaaattgggattcaaattttaaaatgtctctctatagagcactagataatttttttctttttctaatggtatcattggtttgtttgtagctattctgtggaaagccagcaattgccacgcaattttagttaaattactatgtaaaagctgtgttgagcccacaacaaaacgtgtgtcgtgatttttggtgaaaaaagctatctttcaaattacgtaataattattataaatttgttataagtagggattcgcatatttcccgaagggaaatgtttaactacgcctatgcgtagttaaatattttatataaatatatttttttttttttcatttatacatggtaaataattagtaacgtagagatatacattaatgatgaactaatctcatgatgacttttcatattcgataaatatactagaaaaataaaaaattatcaagaacactatattcattgaaataataaatgacgtctactgaaaagcccagttaatgttctattgttttttagccgaaattataacagaccttttggcagttagtgtttaattcgggtactaataatagcatttgtttgatgctcttttcttttgaaaaactcttgaaacatattcccgaagaaaaaaaaacatgtaacttatgctaccattgaaaagtcccaaaaaggaaatattatttttatcaaaacatgaacttgcatttttttaagcattttctccaacagatttattctttttccttgttttaatgctatttttcagtaaaacttcttaaagaacaatagttttgtttcagaaaaaacaagatctgagttatgatctttgttagttacaccataacaaaaatacgagattatcaactgttttccatttgtaaacatgaatgtttcaggttttaaaacctttttcttttttcagactcttccaaaatatacttaaaggacacattcctccaggatttattatgcatcagttttctatgttgaatttaagactctgttccttattgatcgtttcatttaactaaaaagcacaactccgatcaatgaatattttcaaatttataatattatctgttttgttacaatcacaatctgcttctgcaactccagttaaaagagctgattgtaatccatttcaaagaattacacaaacaattacacaaacagtttatagtactgatgcagctggtaacacaattggaactagttataactacaataccattaccagagacacagttgttgactgtgcagattcttacttacctactacaactgaaagaacaactgttccatctactgaagtttccacttttactcattgtgaagaaaatgaacattgtacaagtactgcttttgttaccccaatttgtgataatgatacttcttccgcaagttgtaccgttcaaactactatggttacaggtgctaataattatgccgttgctgttcatactacctcatgtgaagcacctgctggtgcaactggttccttccaatgtcatccaactcaagctttagtcggtctaaatggtgtttctgcaacttttactgttacaaattgtgatattccagactttacttgtcctgttcaaactactacaacttcagtcactgattgttcaggtagtgtacaagcagcatattgttcaactggtttaacaactacaagtgttggtgatcatccgcttacctttgctactacacaatgttctatgcctgctggtctctctggtagttttgctacatcagaatcatatacaacttatgatgcttttacaacaacagcaaccttaactattatcaatcagaatgttccaacttttgactgcccaactacatcatcttcattaactacatcatcttcatcatcaacttcatcttcatcatcaacttcatcttcatcatcaacttcattttcatcatcaacttcatcttcatcatcaacttcatcttcatcatcaactccatcttcatcatcaacttcatcttcatcatcaacttcatcttcatcatcaactccatcttcatcatcaacttcatcttcatcatcaacttcatcttcatcatcaactccatcttcatcatcaacttcatcttcatcatcaactccatcttcatcatcaacttcatcttcatcatcatcgtcatcaattccaccaactacaatcacaactattattactgattgctccagctccacccaacaagctacttgtaccactggtaccaccaatgtcattgttggtgattccactgttccagtgatcaccacttcttgtgatgttccagatggtttaaccggttcatttgttaatactccatcagcaaccacatattcaaatgaaattactactactgttattactgtttccaatggtattgttccaagttttgtttgtccaacctcctcatcatcagttccaccaaccactattaccaccctcgttactgactgttcaagctctacccaacaagctacttgtaccactggtactaccaatgtcattgttggtgattccactgttccagtcattaccacctcatgtgatgttccagatggtttaactggttcatatgttaatactccatcagcaactacttacactaatgatgttactactactgttattactgtctcaaatggtattgttcctagctttgtctgtccatcatcttcatcatcttcacttgctccatcatcaatcccatcatcaaccgttccaactacttcattctcatcagcaccatcatcagcaccatcatcagcaccatcatcagcaccatcatcagcaccatcatcagcaccatcatcagcaccatcatcagcaccatcatcatcaatcccaccatcatctgttccaactacttcatcctcaacatcaatcccatcatcatcaatcccatcatcatcaatcccaccatcaactgttccaactacttcatccacctcatctgttccatcatcagttccatcatcaactatttcaactacttcatcctcatcatcaattttatcttcttctgcttctaaatcttcaagtactaccccatgctcaaccactagtactgtttcaattccaatcactaattgtgaatttgttactgaacaagcatcatgtattgaaggtgttggtgcaacattaattgaagatacattaatttggttcacaactacttcatgctcaatgccaactgatattactggctcattcggtccatcaactgttactaaatcaattactactggtgatattaccacagatattgttttaactaactttgttgttccatctgttgtttgtccaacaatttcatcatcatcatcatcatcatcatcatcatcatcattatatgttccatcttcaacttatgtttcatctactcatactcacactactgaatcaactgttactgttacaactactcattgttcagatgataaatgtactgaatcatcaactacgtcagttactactttatcaactactatttcatcatcatatggctcatcattagatagcacttcatttactccatcatcagttgtctcaactactgaaccaagtactcctgttaaaccatctactccagttgctccaggtacttcatctactccagttgctccaggtacttcatctactccagttgctccaggtacttcatccaatccagttactccaggtacctcatcaacccctgttgaaccaaccacttcagctacttcatcaaaaccagttaatccaactgcaaccactacaccagcaattccagtatacccaaccaattcaactacaagtatctcaatcacagtttcaacaccagttccagttccaagtgaatcaatttacgaaggttctggtaataaatttacaacatcaaatacaattttcggtttaatgtttggtttgattatgatggttatttaaataatttaaattttaattgttcattgtctctctttttttattcaatcgttttgaatgtttttattatttatgttctttcattaaaattttaacagactacctttctttttttttgtataaaataaaatattaaatacctcttatataattcttaaaaaataattataactatttaaaaaattgaactacgaatatgaattaattacaagtaaactttaaatagcatgcataaattgttttaaattataaatctatatagaagagaatgcaataaaaatatccaattaattaaagggtatcgatatggaacagttatttttatattttttttttcagttatatattattagcactattttggtatcataaacgagggatttcacctaaatgtgaaggtgaattagagtttgattgtgattctggtgcaggtaaatattcatcagtatctggatcatcagtatcatttgaattacttgaactattaattggatgatcattattattattttcattatcaatatcactatcggaaatatcatcttcagaactatgatttaccaatcttaaaggtttgggacgattaacaaaaaaacctgtatgactttcagtatttgaacgttgaactgaattagaatttgatgttaaatttgaatttgtatttgaacttgtattatttgttgattttgtaaaagtatttatatcagtattcgatgaaaaattaccctttggttcattagcaattactgataaatcattatcatcatcaaaatctccaccataaacattatttggattatttttcaggattggtaatccaataaatgcatgtctaaaagttctcttaaagaaattaccgtcatcaacagcaatacctgcatctttaccatttgaatcaacataattttgtactgaattctgttgttttctacggtataataagagtgaaacaattataattgcagcaatgacaggtataccaacaccaacaccaacaccaattgcaatacttttatcccttgatgtaatacctgaacttctaatattagcagttggtgctgcggttattgtttgaaacattgtaactgtacttgcactatttataatggtagttgcacctaaaacaatataagagccataatttgaggagtattgtgtagttgatgaagcagttgttgtggttgatgatgatgaagatgaggaagttgtggaagatgataatgatgatgatgaagaggaggatgaggaggaggaggatgttgttgaggatgatgatgatgttgagaaaactgtggaagatggtaaggtggataatctagatgtggtagaactagatgatgaacttgatggaattaaacttgagaatgatgaagttgtaaatggtggaatagatgatgagcttgaggaagttgggttaaatgatgagaataatgaaaaagatgtagtagatgatgaggatgaagatggtgctgtacttgatgttgtaaatgatggaacagaaggtaaaaaagtaaatgatgaacttgatgatgaagttgtaggttgtactgaaaagaagaaagatgttgacgaagatgatgagcttaatgagcttgtagttggtgtggaaaaaggatcaaaatctgaattacctgatatatcagaagaagatgttgaagaaacttcagatgaagattctgaggatgaagttgcagtattgaaaaaatttgtatcatcagaagatgaagaagatgttgttaaactattttcagaagataaagttgaaggagttgttgttgctgatggtaaagtaaaggaattaccattttcatcagttgtttgagaatcattgtcagctctaatttctaatttgaaacgaggtatgattgcattatttgaaccttgcataatatgacgtataatattatttgcatgatcagcagttgaaaattcattattaacatgatcctcagtttccatatcattatgattttcaagttcttcaaggaaaatggatataaacttagaatccatggagacattatcttcatttaatggatctatgttcaacgttgatgaattatttgatttagtattaaagttattattattattattattattattattattattatcattattttcattatttgaatgagtgaataaatcactacatttatgatcaagttttgaaggggtagtagtaattattagggttaatagtactatcatggaaagcataaagaagaatagcagtaagcatattttaaaccagttcttcctacttgcttttagtttatcattcatgatattattctggttattctgtatgacatttttttcaggatccatatttattatgagattattatcattatcattattattgttattgttattattattaataataacgttgtgtttatttatccacaacataacgaaggagactgtttaatagaaaacgagtgtagttaaaatggaagagtgaataaatgaaggtgaataatctaaatgtaatttaaaagggatgtcagatatttgatgatcaaaatcaaaaataaacttcaataatggaaatatagtaaattcaggtacttcttttggggtttgtttactcctttaaaaaatttcacttatttaaatttaaaatttgaatcaatttctaaacggttcggattcgcgcggttcttttttttctatatttatttgtaatttatttatttttagatttctatgacggatgtgataaaagaaaggggccaattggatgtaaaatatcgggggaggctttcttttatcagtgatgtaagtggtgtgtgtctgttgtagatgctgtagatgattaacttatcactatacctctatgtagtagtactttatctaaatacctattatgtacaatacacaaggattaaaaaaaaaggaaagagctcctttaacttgatacaaaacaaaaagaaacaaaaacaaaatcggaaacaataggttacattctcggaaatttagagcataagtggggggagttttcggaaaattggtgatattgggttacgtaatatacttttttaaataatatcctatttaatactatagaactaaatattactactatcctttggaagaggtgttaatcgtaaatatggtttaatacttctgaattttgggaataatttacttgcttcattatctgaaacagttggtgcaataataacatcatcacctggaacccaatttattggagttgtaatttttctacccattttctcagatgtttgtaatgaatcaataactcttaaaacttctgcagtatttctaccacaacttgcaggatatgtcataattaatctaattttatgacttggatcaataatgaaaactgatctaattgttaattgaactcctttatcatcaatatttgttgcatcttgataatcaatcatatcatataagagtgcaattttcctttcaggatctgcaataattgggaatgataatcgactacctgtaatttcatcaatatctttaatccatgctctatgtgaatcactatcattaactgaaagtccaattaatttaacacctcttttagtaaattcaggttcaagtttagcaaatgctcctaattcagttgtacaaactggtgtaaaatcatcaggatgtgaaaataaaatacaccaattttctccaatataatcataaaatgtaacatctcctaatgatgaatctgctgtaaaatttggtgctgttgaacctaatctaagggtaccattttgtggttgtggtattgacattgttgtatgtatgaaaatttattataagattttgttatgaaataatgctttaaaagtttagaaaagacgaaataatattaattattatagtaaacttatataatactaattgtggctaaactttatcactatgaactcccagtaaattaacacttatctctaagaattatttctactaagcatccacacattataatttcaacataaaaaagtcatgattttagaaaattttggttagcgagctgccacttttggtaattctcggggattgatttttactaagtggcgggattacgtaattttggtttcttttttttttatttttgtatcgaaactgtttattcaattaaacacgaaaagctatataccatgataagataaaaaaatggggaataagaatgaataaataaataaaaatggttcataaatgtagtaaagaatttttatattgttcatttaaaactctacttgagagactttaaaataatttttttttttaattataattatgatcactgataaaaatataaagtcaattcataatgactgtaaatgttgattaatataatgatctaaaagaaatgaaactaagaataagaataaaatgaaattgatatcaaattagagaaaaacctaaatttaattattttctggtcttaattttctaacttccttaccaactctccagatttccatacctctgatagtttctaattctttttctaattcttctctgtaattagcttgagagttgaaatctaatgatctttgagtttcagaaccatctctaactgaagcatataatttttggaaaactggttttaagttatccttgaaaattgggtaccaatctaaagcacctcttcttgcagtagttgaacatgcatcatacatgtaatccataccatatttaccaactaatggatataatgattgagttgcttcttcaacggtttcattgaaagcttcagatggggaatgaccattttctcttaaaacttcatattgagcaaggaacataccgtgaataccacccattaaacaacctctttcaccatataaatcagagtaaacttccttttcaaaggtggtttggtaaatgtaaccagaaccaattgcaacagctaatgcaattgctctttcttctgctttacctgaaacatcattccaaacagcatatgatgagttaatacctctaccttctttgaataaagatctaacagttctacctgaaccctttggagcagcaagaataacatcaacattagttggaggatcgacatgagttaaatccttgaaaactggagagaaaccatgggagaagtataaagttttaccttcagtaattaatggtttgatatctttccaagttgaagattgtgcagcatcagataataagttcataatgatagtaccttttccaattgcttcatcaattgagaataagttttcacctggaacccaaccatcttcgatagcagccttccatgaagcaccaccttctctaacaccaatgataacatttaaaccattatctcttaagtttaaaccttgaccataaccttgagaaccataaccaattaaagccatagtatcgtttttgaaatattcaattaatttttctcttggccaatcagctctttcatgaactaattcttcaacaccagcaaagttaattttctttaaacctctaactgagttaacattagttttagttgcattgattgaagcagcattaattaaagttggtctctttgccatagaggataaagctctagtggaagatcttgatgatcttgcaagtcttgcagcagcgtttctgtacattgttttaagatgtagtttggataaagaaagaagaaagaaataaagctaaaaaagaatagaaagaaatgagaaggcagtaaccaatcttgggaatactgggaaattgctttaatttaaatactcgacgtattcacataattaggtgactgaaaaattaagaaatgctgaaaaattattattactcacaatgaaaaattcaattttccactaaaattactataccggtaccggaccgggactttttccactttttattcagggcctgaattcttatcacagttataatgccttataagaaaggaagtaagtataataagatcatcatcagtagtttgataagtgactcacgctattaattatattgttatcttaaatgcgtcatagagtacactgtgtctacattctcataactaaaagtgaaataataaactcactcattttttgtgagtggaaatgtaaattcactcagcttttgactctgtccactaatattaagggactgtctttttatagaaaaaagatttttattttatattattacgtaatcgtgtcacgtgataggtttagtattaccggcgcgtcgttttgacaccagtacactttttttattaaatttggaaaataatttctttgaggggaatcctagtctactatatacgtctacatgatatatattttgattacatgcaaattaatataagaatttctattggattagtgaaatataattaataaattgttttaaataacttttttaattgtacaacaatgtccgtttcattttatagaacattaaagaatatttggcgtaatggtcttttacgttcaggtcgtcaaattgcttatatgaatgatacaaaatcaggtacattagttggtgaagatgattttggaaataaatattatgaaacaactgatgaagatgaaattcatatgagaacaagatggtgtgaatataaagatttttggagatttgatgcttcacattctgaacctggttggcattattggttagcatatggtactgatactccaccaaatgctttaccaaaggatgaaatagcaattagacatatagctccagagaatcatcatgcaattaatcatacttttacaaaaggtgcctttattccttataataccgctaaaccaaaattttcaacttgggaatcatctgttactccaagatcttaaatttaataaatttaactaattaattgaaattagcaatattcttttatttattctatttattctataattattattaaagataatataataactttatataacgtacatcatattatattattattttcatatatacacaaaaaaaacatataagattacaaagaaacaagcacttttttttcttatttctctgcaaatgttgctgcaacaattaatgggaaaactaatgtaacatcagtataaactttaatacttttagcttctgccttaattttaccccatgaaattgcttcatcaggtcttgcacctgcatctgatgcatcaaattcttgacctgtattaatataaactgcataatctgcaccatttctcattaaacatgcattagcaatatgatgtttaattaatccaccacctaaaattaacatacctgccttatatgcattcattgacattgaattaatttttctaatatcttcaacaatatctaatctaatttgatttggacttgccttaaaagtatggaaaaataacatatcaccaattgaaccatctgttaatgcaggacagaaaactggaatttcattcttatgacaccaatataaaactgatgtttcatcattaatttctttacctaatctatcaataaatttacttggagtccaaaatggtgtacctgcatttaaagcatctgtaccttcctttaagacaaaatcattttgttccttaagcataacatctaataatggaaccatccattcctcaaatttacaataattatcatttggaacaaccatattaccaattctattcatacccttttcacgtaatgcagcacctggagctgcaaaatcactcataaaagttggtgctaaacatttaataatatcttcttcaataccaccagcagttgaaacaattgcatcaatcattttatgttgagctaaaaatcttaaagtatcccttaaacctgatgaaattaaatttgatgtataacccataaaaattgttgtcttttgaaatccattttcatcaaattgtcccttacgttcatgttcttctaattcatcaatatgtttacctctccatgaacgcatttcattaataatatcacatgcttcagctaatgaacttgcttgacatcccatagttctcataccttcaataatatcttttgctctagcattacgactttcaggttttgaataatcaataccatgaactaataatgatccttctggaactggatcggatgctttaagaacagcatctcctgctaaatttggaactacacctgacatatttatatttccttatcaaaagataaacccttttaaaagattgaaaaatcagatcctttaaatttcattatctgaaaactaaaaaaaaaattaatttattgctccactaatttaaaataatattatataggatattacgtaatgtttaatgatctattctataatctacatgcttaacttgataatatcggagtgaattttaataccatctgttcactacgtggaactgtagtgtaaatatcaagcatttctccatcatgatcataatcaaacttatcatctaaagtaatgttataacgacataataaacttgtaagtataatttttatctctgcagttgctaaatttaatccaatacacattctgctaccagcaccgaaatgcattaaattagccttcattaatttatattgttcatcacttgcatccagccatctatcagggttaaatctatcaggatctggaaataatgttgatactctatgtaaactccatggttgcataacaattgttgtaccacctggtattttacatggtttaacattttcattaccattaaatatcatacccctagatgaaacaattcttggttcttgacctggaattgcagcacgtaatctaaatgtctctaataaagttgcatgagtgtatggtaataaatattcatcatcgattaaactataatcaaatggaatgtggtttgaactttcaatcggtttcccattatttaaagtatcaattaattctttttgaattttcttttgaatttttggatttttagctaattcataaaaaaaatatgataatgtcgtacctgttgtaacatgacctgcagctatatgatcaaaaaattcagatttagttctatttttagtgaaaattggacttttttgaatcactttaccgtttaccttatcataatcaaaataaactgttaataaagtttcctcattttgctcaattgtttcatttatattattaaaagcatttaagaattgattttcaatccatttataacacttattagaggcttcaataactttatcagttgcaacataatcataaaaatatggcatttcagtaacccagaatccggttgatgattgtaatccaaattctttaacaatttgattacctttaccgaaaggatcagctaataatgaatcataattacctttgccgaaagagaatgaagtaactgcatccattgccatattacaaaaaacattaaaaacatcaattgattctttattatattcatcaaaaactttcaaagtatcagtcattacggtaactattttagacattatattttctgaacaaatattagttttggaataaaacttatggctaacttttcttgattgaatatgttgtttcttatcttgagttgagaaagtatttggttcatcataattgacaaattgtgcataaaagctagatttatcaaaattaccaacataaatatctttttgatatttaatatcattaatgtcaacttcattaggaccaattctaacaattgatccgtattgttcgtgtaacttttgaacatatctgtttctttgctcactccaagaaatatataggatatagtatttcgttaatgcgcatattttgggacctgggatgttagataatggatgaaaatataatgggtatataataaaataaaaaactaacgttgaaaatccaaccaataaaattgagtttaattttgattgttcaaactccgatgttgatattagattattaaataattctttaagcattgtattttagtattcactactgcaaattattatatgaatactgataataaaccaagtttgaaatcgaagaacaagagaacaagagatactgttgaacaaattgatattcctttagctttcatgagtcaacatgattcactttgataaagacattgatcccaattaagaaactgtaagcgactgcaagttttcctatcaagaaaataatttcaaaattttcatgacactctgaattttaagttgatggtttttgaaatttttcaattaaacagttctatctctttggggtttctttcctggaattaactcactctggtcgccatgttgagatatatacagtttagtttcgttgaatatacaatctgagactcagcttactgtcttagcatggcaaccagagtgagtttcctcaatcatttcttcaatgaatttgattggattgtggacaatagggtccatgatcgattgtgggattgtataataacaaaaagtttctaatatatatagtatttatatacaaaatttaaatataataatattacagaattgattaatcatacttatctgactaaattgtttatctgtctgaatgttttgctgggtatgtaacaggtataccatcccattcctctgcgaatttttgaatgtataactcaaaatatctcagataatgtaatgtaaaatattttggttgatgtaatggaactgataacggtgattttttctctagccaaaataattcatcatctatggcattattttgacatgtaagtctcatcatattatgccactcaatataattatatttgtgattcttatcaagacatagatccagtagtgttttacgcaattccagcattattacttgaattcgacttaatttatccaaaacataatcgttctttttcttgaattttgtctcaactatattatcttcactgattgcgcctacacccaaactgtcactatcttctcccaaaccatttaatttataaatctcctcaaatttatttacatcaaaatttacatcaagtgatttgaaattttcaattaatacctctcttgatttttcttgttgttcaggatcaattttgactcttttaccttctctaaaataatttgctaattgaactgcagctgtatttgacctaacaaattgttttgaatgtacaaatccataattacctaaactatcaatatctaataaaacagtatataacatatcaactggatgtgaagcaactggaattccaccaactggatcaatatcaaaatagtcaggattagattcatgatcaaaaacagatcccgcaaattcagcatgtctacttacatgattcatgccaccaaaatttccatgtgattttgatttttcagttgtttccagagaattatcactttgaacatcattatctaccgtaatcattgatttcattcttaattttgaaatcctatctttatcaattgaaataacttcctttctttgaaggaaatacccaaaatcttttaaatatttattacttaggcaaaattctactaaaacttcaaaagttttaaattcactaatatttgtaattttatagaaaacaaaatcacttgcagttgaaactaaaattgtcataactggaattgcagctaaagcccaaatacagaaaaatgttttgccccctggtgtaacaggattttgacttccttgacctaatgtcataagattgaaaaaacaataataaacacttaacttatatgaccagtcttctaataaggcaaatgccaatgcaccacacataagtgtaaccatgaaaataaatatagaaacagctaattcagaaataccttgaattgtgaatgcccatttatgaatattttttataagcttaaatgatcctgcattatcaagtttgatcttttcatcttccttatgagatttataaaatcgtttccttaatctttcaattctatgccaatacaaagttgaatctgagaaattaaacatcatattcctaatactattaatgatcaaaccaaagatgactaaaccacaaacgatccaaattgatgtcaatgtttgtcccaatgggttagttgtactaacgacgccttggtctccgatggtcacaattgaattaatacaataaaaaaaagatggaccaagtcttaaatccaagactgcggtaaaaactccagcaccaatgaccaaccaaccacttaatgctaatgtttgaacaatcaatgtttcttgcgtattatcaatgttgaaaactggtttatattttttcatcaaaaatccaatttcattgacaagcaaaaggaagaagtttgtgaaatgtaaacagatggtaataatagcaaaccaaaacccttcaccaatgatataattttcattatgtccacttctataaaaccagatatgataaccaattattaaagcagttaataaaacacaagcaatcccccatccatatattgatatcacttgaccttttgtatatctaattttctttctatagtttaaaaataaaaatgtatttgagacaattgcaaatgcacttgaaactgtattaattgagtaacaccatattggatctttttcatattttgggtttattttattaattttccatggacaaataatagccataattgagaaaacatttgataatggaccagagcaactacataataatgggatataagatgaacacaaaaaccaaaataggaaatgtttatcaccaggtttaacatttaaatttgaaatttgccatgatgttttacttgaaaaactattgtagaattcatttaatccgctttcttctaattgtgatactggaggtattgtataatctgttgttattcgttttgtatttctgaacttcttaccaaactttgtagtttttctgtataggaaatgttcagaatcatctacggttgactttgatcctaacctagattctgatcttgattttgatctatcattgaaaaatgttttataaataggttctggtataacatctggctgtaaatcatctacaatttgacgtattcctcgtgtatcttcatctaccacttcatcagctaaacttttatctatttgcaacttagattgagacaaatgtcgtagtaggttcagcctcttcctgaaatattttgttgttccctggtaactacggttgatatttttccttgaacctattgattttcccatactggaattagaaaagcaaagaaatgttcctaaatgaacctaacggtgaaaagtaatgtgtctgttatctgatcactgataattgattcaatgtaatgaaaaaatgatctaatcattcctgagctcgtaaaaagctttaagggcatccactcccctcaggtgatggtaattccgttaaggaccctcaaagaatcaattttctgcaagagtttttctttttggttacatcatttttaaataagttgattgattatacaagttattaacaggcatcttgtatatactcatatttcaatatatgtttaagtctgtacacacctccattctacgaccttttactcaaagttggaagttaacatttctaagaagatataccagttccaataatggaactatatctaaatccctagcatcacaaagaaaaaaagttttaacatttcaaaaaagtgaagtttcagaacttgatccaaatgaaaatataaatggtactgaaactattattcatcctgcatttgttacctcttcaaatttggaaacttatcttggacaacgtgttaaacccgttgttagtgttactaaatgtgagagctatgattttgataaagtttttttggtattgtcattaaaaggtttagctccagtcaaaatagttcctggtgaatgtattaaatttaactggaatcaaaactgtgtttttattttcaagtttggtactatagttgcttggaatattaatgaaaaggaagttataaacaatatcttaccaatttttaaaaatagtgaaattaccagttatcaatatcaaagtgaagatttagattatatagaaattaataaagatgttgatcaagtcaaggatgaaaattttgaaaaaattattaatgaacaaaatgaaattggtttacaaactagtgaatcttacatttccaaagatactgagattatttgcttaaatgtaccaaataaatcacaaaagctgttagatatgttagcattttcatatggtatttcaagatctactagattggctatcttagaagaagcagttgaaacacatatcaatcttacaagatcaactattgaaaaattatcacatggtgaaaaaattgcagttgatccaaaggaaacattgaagttatcaggtagattactacttttacgtggtaagttgaatctttattctgaactagttgaaactccggatatttattggagtgaatcacgtcttgaaaaaattcatgataaggtatcgaatgcattagatatttccaaaagagtcaatatcttaaacagaaaactcgactacttatcagaagaagcggatgctcttgttagtattatgtccaaacgtacagaggtcaatcttgaacttatcattatctacttgattgtaattgaagtctgttttgaaacgtatcacttctacgaaagacttggtggcaaatataacattgaatacttcaaggcattacttaactaatcaattacatacattgtatatagaaacacagtatatataacccttaaataaacaatatcaacttattctaatactaaaacctgataataacttaataatttaaaaaccagccgatcagtttttatgctgtttcagaccctcagacaatccaattttttgagaatttcaatgccctcaaaaatgcatcaagatgatggattagcctttaaagtggacgttgtcattaatacagcccatctcttcttctatttttgtctgctctacccctatttcctttactaaagcaaccttacttcactcttaaaggattcctgtttgatctagttgatattttgtaactcaatgcagaatagaaacagaaattcctatttggaaacctcatatacaggggttggtgcattcagttctgcacctgcacctcattcaaatgctttagcagctgcttctgtcattggtaatgctttaaagaaaaataatcataatccaaataatcttgatttaccaaaattacaagctccaaaggctccacctaaactgtcaagaacttcatctgtaacttcatcttcaaattatagaagaaattcaactagaaatccatcgattactgaatctagttatatcaatacaattagaacaaactctataaatactgcaagtgctcgtcgtatgtcattaactacactatctaaacaaagattacaatcacaaaaaagtgcccctaatttaaaaactagaagatctgtttcagattttacaaatacaaattcaaacaatagactctcatatttaccaagacaaaatatcccaaaaactattaaaaaatatgttccttctgcaaatggtttggtttctgtggaagtcccaaatcctaaacatccggataacatgccacagtcaaaacaaaaagtgaactcattatcaagacaatcttttgggaacggttatattaacaacagattttcttcattgaaagttagtgattcaagagacaattataatagtagacaaacctcaatgggtaataaaaatattaaaagagaagctagaacacttccaaacggtactaaaattataagtactacagttgaagaatatattacagatccaaacgatgaattttatcctcataatgacaatgataattatgatgatacatatgatggattcgatgatgctgaagaagttcataattttaatgaacatgatgacgaagaagttgatatgacaatgacactggatgaaattaatgaagaagatgaaaatgcatctgttgaaaaattaccaaataatcataatgttctagattcaaaagtaattgatgatgagacttatgaaacagaaggaaagagaatcattgaaagtaatgaaaaacttgaatcgcatgaaagagaatctgctttcaaatcagtaaatgaaccaattaaagatacggttattatggaagatttactgagccgtaatctagtacattcgattactccaagtttacatcacctcaacaataaaaatattatctcccctcatttaataggaaccccaagctcaggttttatttccgtttccgacatgagagatgaaaaagcttatgaaaatagtgagccatttgttgagaatgatgattacaaagatatagatgatgaagatgatgaaattgatgttcctcttgataacattgtgattgtcaatgaaaataaggaattattagatgaagtagaagatgataatcaagaaagtgattatattgatgatatacctgaatctatggatgaagttggtgaatttgcttcaaatcctccctcagatgtaaaggcttcaaatgagtatagggaagaagaatatttggcagcgcaagcaaaattggatgaactagttaaacgaaaacaacaagaaattcttgattctatgattaaaaatggtgaagttgatgccaatttagttgatggggaaaacattcatgatcaagttgaaactgaagtagatgaccatattgctgatgtggatgtttatgtcgatggtggcattgttgaagatgttcaaataaatgtcaatgataatgatattattgatgaaggtattaatgaaattgatggtcaaaatgatgcagtatcatctgatggcagtgtatatccagactctttgaaagatattgaacttccaatcgagcaatctccaagtaaaaaatcctattcatattatcaagatgatgcaacatcaccaaataaaaatatgaattttcatactacctcaaataatgaaatttccactgatgtgccagcagttgaaagctttgaaaaaccgttgttttttaatgttgatgaaaataaagctgaggaattctacactccaccggctactcctttgggtgaaaatcaattatttagcaatgctactgaaactagtgtagctgcaactgaaactgaaccagaaatacacaaaactatgaattctctttcaatagatgcttcaccggattcttcaattgtccatgactctgttatatcagcaactcaacctttgaagccagcgatctctgttgaaaaaaagtcaatggctcaacacttaagaccaactgttgaacctgttaataaatctgttaattctaccccaattcaggcagctaacagaactgcaaatatctctcaaaatagtacgcttgataatcaacgcgttccaatttcagctataccaagcagtgttcatggtttagacgatgaaagtgaggatgatgagtttaatgaactggatcatttagcagttcctaaaagggagccatcaattcaagcaaaaattgacttagctgaaaaacgtaaaactttagaactaaataatagtgatgtcaatttggctttaggtgaaaataaaagtgttgataatataaccaaaagaaaatcagttctgaaaaattctcaagggagtagatcatcattacatctttcacaaaatcaacaaaacaatgcctcaccagcatatctgtccctggcaactgctcaaaataccaaattgaatgctatgaattcagtctcttccaaaaatcaaaatataaacaatttacaagaatcaacttcagtaaggactagatcaagagctggatcggctgcttcgagtattcagaattctgcccataataataacgtatataccccattggcagctgcatctaaagctgcgcaaaggcattcagttcagcaatttggctctaatggttttaataatgatcaattcgataataaaaataaaagaaatttaaatgcaaatccaaagaatggggcaaatgatggtgattatctgtcaagggtaggtagtgtaaaagcgcctaatcctaaagttgaggaagctaaaaagagaattttacaaaatagacctggtgcaaaacgttcgaaagaattattagagttatcaaaaactagaccacatgttaaaaaggatgatttaattgcactgaatgatacgtcgtatgttccacgtaggtcttcatttgagaaagagcaaagtaaacttggtgctgatcaaaacataggacaaacaaaaatgacatcattatctctaagagatttaaattcttatgtgtacgaaaatcaagatcatacgaagcattttaatcgtggttataagtcaagatttgccgatgataactctgatactgatttaccattacctcctatcaatacaactgttgctccagctacttataaatttgatgaatcttcacatattcctgctgaacctttaaacaacgaaaaaactagatcaaatggatttaagtttaagttcggtggaataaatagaaaaaagtcaaaatctgacattgttgttaataataaccaaaattttgcaactccgtcagtaaatcaaaatgttgaaaaaacttcacctagaaaaccgtcaggcctgtcatctctaaaaactcaccttcatagtaacaataatagtaatgatgcgtccaatggtgtcaatgatagtcataaggaatctaagttccagaaattctttgttgatcagcatggaccacgtactcatagaaatgttagtacagcatctcacgctactacaaattcacaagctactgaatctaaaaagaaaagaggatttttcaagaaaatgttcagtgatgaaaaataggaatccaataaagttttgcattttattgttcgtattacagtatagttaattatttatgtattgttttataattatgttttttacctataaattaattcaaaaacttttcataaaaagtgaatcacttgagattaagctcgttcatgtcatctgctaaacgtttctcattatcagcaggtacgaagttaccaaactcgtcatctttgtcatcttcgtcatctttattctcttcttcttctggttcactttcattattaccaagtaaaccaacttcttcattgttgactaacaaattatctatattatgatcctcgaaattatctcctaatgcacctgactctaatgtccatccagtcatcacactttccgctcctttactatcaatactagttctattgataccattacctttagtttcagattgagcgaatgaacttgctcctgactcagagctagcagcagtatctgctcttattctggaatcgcccatcttcttcttcacttgtgaagcaactcttacaccatctgccataacattattgaccattcctctaatattacctaccattccaccaaaaacagaatcagtgatatttccaggtgaatcaagatcaaaagatttccagaattgattttcaaaaaatgatgagtatgtttcatttgctaaaataaccattcggaacatagatggggtaatataaactgggtgtgttggatcaagtgctttattgtgagtaatgcttttttttcgcttgtcattcaaatctccatcatcatcatccaaattaatcagattttcatctggattttcatagggttgagcatatttgaatgcaagttgtaaaaatgatgagcttgctgaaaggtatctgacactttgtttggttttccatttatcctcgtcaaatttcacttcatctggcaggctaatttcttcggtttcacttacctcaacacctttttcaattaaattttttcttctttggacaatcttttcggcaatttgatcttctaattctctgttggcaattgtatcaaatattttaccatcacgccatggagttgtaataaatattaaatcttcagcaacttcgagtactgtttctttattaattcttcccgtattttctgtatcatataatgaaaaaaagttagataaagcattcatcaaatcacggttaacaatcttattgacaccaacaactaaagattctaagctcatctcaccattttcatttgaccagtttttatataatctcttcaaaaatgatgattgatcttttgtttctctttccatatttacccaaggtacaatctctgacatgaatttttcaaatgagttgaaatccatggtcagattaccacgatttggtgaatttgagtcctgaattagaattctatagtatctgtcatatatattagatatttgttctttgttaagatgtggggtatctggtaaatttctaatctctgctcttttcacaaataaatctatacctttgaacacttcgtttttaaatgtgtttctatattttataatcatacgatcatcaatcatttgaaaatcgttgaatgcaatttcccataatatatcaaactttctttttattttatgatcctcaggtgtaatttcatcaagacttgcaaaaaaatttttgaaaacggcaatacattcaccatcatctgtacattctaataattcctgtgaattaattttgacaattgccagcgcaactttaaacaaagtttttggaccgtttgcaaaaaatgagtccataactctgaaagcaaaaactaaaggcattgtgttgagaaaaaatgataaaaaccatggcaatgaaacgatagaaagttgaatatcatacttattgaagtgatctgctaaaagtggtaaagtcttctgaaccatgccttcaaaaactttttgatctagtaaaacaccgtacattgttttggaatagtaacctggtataatcttatcacataacacattcaaagtccagaaagcctgatcttctgtcatgaaaattaataaagctgcggtcacaatattcatagcttgacaatatccaatatctggattcttccatgaatatgcagttaaaactcttcttaatttatctattccttcatctgtttggaaagcagagtattcaggtaatgatctatttaaatctttttctatttcctcaattgccagtgtatgtttgcccttattttcttctaatagattttcatattcttctgcattttgatacctgtaataaattgatccggaagatgtttcccatatctcacctctcaatctatttgggatacctaccaggagtaaactgttaaatatatggttttgaaccaattcgaggtttctaccgtacctacggaaatactcaaaccatcttttcaactttaatatctctttttctctactttcatttcctggaaatttatactttagacccaaacctccctgaggatgttgaggtatatcaatgtgtttttcacctaattttgagttcttgcaatttttactgattaagtactcagaataaagggttctttggaagctttctaattttacactgtcttctttacttaaattgtgttgtttgttaaatgtgtgccagaaatgttcagctttcgaccttattgtatcacacgtgatatctaaaatcattccatttgttgttgaaactcttacgtgtaaagtttctgcgtttggtaatttttgtactttattgattgatgttaaatgaaaaacaatcttgtcttctgtgctatcattttgtttgataagcagataattctgtgttaatgtcaattttcctggtctccgtgaattgatattgtgaggtacaggtaagtaagttcctgcacttttgatactatcgctgaaactatatagcaccctgcttgttattatgtagtctacgttgatttcacctaatattttttcatctgaaggtacatgaaagaacccttgcataagctggtcaggagttaagtggttaggattatttattgactcaattgcattttgtgctaatgaagcaacacttttaaaaaaatccatggtattgtcttgtcaatattaaactgtttattcctttagtaggtctgtttcttacaatctatatggtctttaatatattacagttgctgtgtgtgcccttgtagaaactaatttttttcacattgtaattgacagtgaacaataaacatgcggaaacttcatttttacctgatgacaccttttggtggcgcagtttttctgcctgaattggcgcagttttgcaatgtatcttgaagacttttctttaatgagggtaaattttaaaaatagaatcgaattgttatataatatacaaataaataagtagataataaaaaaaagggtataatggctaaaaaatacaacataatcattattcacttgcttcatcttcctcaacaacattttctagagattgaaatatactggtatcatcaactgcattcaggtgctcaccattttttataatttcagtaagagtattttgtcttggtaccttcaaatatttcaggctaacttgtggacctaataaatcactatcgtgaaaatttcgtggatttttttgatgtgaatgactatgaacttcagttatgtgtgggtttgaatctcctgaactactctttgatcgattcttgaacttcataatagggtttattgatggattggaggatgctcctttagatgacttgcccactttgagagtactcttaattaaattatgggtgttcctcaacacatagaatattaatttacttttaaccaatgcaaagaactcttcatttgacatgagtctattcgaaacatctattttcggaatcacaagatggaaatcagtcaaattaacgaagctatatttaccagtaccattgaatgtcaaacgtatatctattgaatttatcaatatatggttagccagataatatttagaagacctttcttccattattttaaccttactcgttgtacagtttaatggttttgtagactttgaattcgctaagcctgataattgagttgatttatcgccaatagatgatgttgaagattttgatgaaagaggggttctggttgaagttgaattttgacttggaggtgaaagtctagattgttttttgtgcataaatttctgtaatacctttgatactttggatgctgatttttcggttgaatgagatgaggaggctgacagttcggaactaaaactatttcttctactattcattgaagagtttgattgaatggagtaaatattttcaaagaatgcatcagagtcatcggtatcatatgattcagcccctgacagtatttgactttttgggtatagtattttttcaagtttatcagcaaatctcatatcaaactcaaccttcagtggagcaaatgttaattctttatcggttacaacacgaatgccaccaactggcggagctaaagtccagtctcctctaaataatggctgatcggaatcttgaagtctaacaacaactgtttcatgaattgccttgggatgtttgtcaaatattgcaaaatcatagacatatgcagtattgactgattcgccattttgagattgtgtaaacatgtaatatgaatcaattgcattaacttctgtgaatggtaggttattctcatcgtaaataactaacttaatagttgatgccatgatattccattgtgaaaatttatgagaatcattatactttttgttctttgaagtttgtaaaatatcaacaatagcattcaaacttaaaaatactttttcaagttcaatattagcatctagtatgtcatcatcgatattcagaccttctgaaatattagcattcaccatcaatcttctgcattctgacaaacttcttgcttgcctttgtaattcaaccaaatcttcataaagatcatcaaagtttgaaagatcagaatatttcacatagtccttaactgcctttttcatcttttgaatttctgtttcttcattttcaaaaaatgaatttgcaatttcataaagagtttcatattgttcactgtttatcatcacactgaaatctggggctattactctaatagtttcctttgataatgacgcgatattatcctcgtcttctaaaaaatgtaaagagtttggtttgacatacaaaagagcacatgacaaatcttgaataacaacacattcatccagagagccaggtgtgtaatacatttcaataggaagttttggaggccaacatactgatttcggtgaaaaaagtcttaatttgtttgttaaaatattctccctatccataacataaacgaaagcatcagttaatatcaacccacttcttgattccattggtaatgataattgaagaccatctgattcattattataattgtcactgtgtcccttcacatcaagatttctcaaaacaatttgattacttgttaaaagtgtacaaattttattattggtagtaactgcaatttgaggtaaaatcaatttaatcagatatgaatcatcagtttcagcatttttgtaattacttgtgttatgtaactcttgatcaaaatcgtctaacatcagttttgatttctcaaattcaataattggatcactctttaaaaatgaaaggtcgggagtgtcatctgaatgttcaatagattttctcaattgttcagccagattcgaagcttgttgactcattgaaaaaacaacaaattttctgtctttgatagtttcaagatatcttaaaacacccatttttgtgtttttagtccacttgatattaatggtataaatactaaacctgtttctatagtttgaggtatgaataggagcagatgatatttttgattttgctttggaaataaatgaagaatttcttgatgaaactcttgttaaatttttcgataattcgtaaataatttcatcgcctgattcagcatcatcatcaatgaattcatcgtattctgggaatataccttcagcaaacttgtctttaagacatctcaaaatatgtaacctatggtgtaattcttgtaattcattccttaagttgctcaatgtcttattaataaattcatttggtggtttagattcaaaatctttaatttctgcattgtggaaatcaataatatcagtaatctcagcaatccttccttccactaatgaggctggagctgctgcaaaattccttttgtctaattcacatctatgagtagtactttcaattgtatcaaatggataatccagttcagcggatggtgtctctctaacataataaaatctgggtgatgaagcaaattcaagtgccttccattttggttcttctttgggtattgcttgagtctcaagttcaatgaaatcattatgatcataccaattcctatccattgattcttcactaaatgatgaggatgaatctgactcactaaatgatgtagttgaagctctgtcgagtccgagcttttgaacaagcattccggcagcagatgcttggttgaaaatagcactcaatattctcaagtcggcatcaataaaatcaataacacctttgtccattttcaaatgagattctttgttagttgagtctgttttcttatcataaacaagaacttcttttctagtttgatgtaaatccatagtgaatgatttaacaaaacattttaacccagtaaatgcaattctactaacaccacgaccagctgacgaatgttgataaacatgtgaaagataaagaggagataaatcaacactataacttaatccaaaaatactagacccaaacttaggtgattttttatcacttaaaaattcatttttaaacatttttccttcttttattggtaaccctaaactggttttaaagctgctccaccagaaaaaaaagtacagcattgcttgtggcgtcaaatgtaatgaattgcaagatgtgcctggaggagcatgaggtaaattggcacatttgttatcatctcttgaatacactgaaagtgctaagtaaatgtaactacttctccaacctgcgtaggagtcccagccagctttttcctcttcactaaaaaatgtatctggattcctcaatgagacatcataatgtggtctaaatttgtttgtacgctcaacttcacccatattagcttttggatcaccatttacatttctttcaaaggcacatccaagtttccaaatgacaggtttactatctaatctaagtaaaactttagcaatctgataatcatttgcactagcaacaccattagtaagcatattagcaacagataaaggatcaaatactggtacacctatttcaaaaacttcactttcaacaatcaaaaaattttcaggtttacctgttttgttgattgacaaagtagcattactatcccatttaaatgcaaaaccggcatttctaccaattaagtgataaggagattgacttgatttgataaataatgaaattccctttttaaaatgaaatgtgaactttgatggaactaataatggcattttatcccagaatccaatttttggtgatatatcaagtggtggcttggataaaagatcaaaactattgaatgcataacttataccacactgaagtgaaggtgcccaagaaacacgagcttctcttgaagaatcgatattaaaggtcatatctgtaataaatttaacatttgtcattgttctaccaatatgaaatgcatataaactatcttttttccttggatcactatattgtggaacacatggaacaaaattgtaacggatttcttcttcagcatatgcttgttcacaaatcaccagatcaccatcaaccattacagtttgaggtccgtcatctttattaccaccaaatccaatcaaaggtaatggaaaatccttgatttgtactcttaattcactacatgataatttcagattcaatggaaataaaataccatatctcatatctttaggcattccaccaccaactctatgcaaatattcagcataattttcaagtccaaattctggttcattaagatctaaaacagcatctaaaactttaaagcaaaacaatggttgtaagtttccttccattacaacaggaaatttctttaaaaactccttacgaattctaggatctgctttgttgtaaccatgaatgcttttatcattattcttggattcttcggatgttttaactcttcttatccatgatttacttatgttggcataaagtttatttcttggtatctcaattgcagtgtggtattcacgttgatagtttagccatgcatcacattcatcaggtaaagctagtttggaaagtctggagggaatattgctactaattgtattattggcttgtctattcattttgcttgctgggagtttatatcctgtagaaaaagattttttcatttcagctgaagttccattggggataaaatcacttgacttatgattaattgattcaggcataattgcagtatcaccatcaaatttcaaggaatttgaatatttctccttcaataacttaagtatattcttttcatatttggaaaaatctgccagtttggctaatctcatatgttgttcaacttcagaaagtaaaataattcttgttaattcttcttcaaatggatcatcatggttgcaatataaaatccttctacttctaattgtaatttttggtaatctaggtggactctttacaatactaggtttaataacatcaactttaaagtctttttgatcctcttctatgaacatgatatctctgaagtttaatctaagctttttgatggatttaaagaaagctttcaaattatcaaatgttttataaaacacatattgatatggaatttcaattcttatatcatctgtatcaactaaaaatcttgtttcatcttttccaacttcttccttaggtaaaattttaacatttgcctttgaaattataacaacaagagtccaaaaatcatcaatttgaggattttgaccatatattctaatagctttaaatctaacatgctgatttctattagctgatggtaatttggcatatcttaaagaatccaattctaatgctacatcgacattagatggcagtttaaatttaatcatcaacaatcctaatatggcgagaatattcaatggacgagaaggtttcttcttatgctttgtttctttattaatagcaaccggatatctacccttgagcgctttaaatactgtctcaacaaagaaaagtgtccataagacttcaactgacactgtaatatcaataaccggcataacacatgataatctatgatttaagtaggtatacttactgttgaatttggataaattgaggatgttagtgaaatctcttttctgtttttcattatcataatctcttataagtgaaatattgaaatcaagtaactttatatttgagattggtatatcaacagtattatcatgaacatatatcaattgtttgaaaactatacaaacaccacgtttgtatgcattcaatggggtttgatcttcaccatcccaatatttaacaggattagtaaaacatgcagttaatgtaattttatgaattgtaaatttcacattatgaattatacgtgtgatatatgatgcgtcaccgggtaatttttcttcatttgaattcatgatttcagtatctattgtttgaccgataatttcaactttttgatcaatttcagcttgtgtttgtaaatgatgtttatcaattatatcttggaaaataattgataatttcttaaataaatcaatattttcagctaaaaactcgatatgatgaattgcagatttcacatcttcaataaccacacaatcaccattcaacaaacctgaacctgataattccagtaaatctaaaactaacattctatgatgttcaaaaccatcaataattgaaaattgaacatttctcacagcagaaaacagagatttggcagagattgattgtgaactttcttcaaataaagatgtaacattaccggtcagggaagaatcgactaaaatatcatcaatcagtagatggcagcatgtattatcattcaatgaaacttggaaaactgtggttaatgactgtaatcttaaacgtactttacgtgataatctcaataagttttcaataatttcagtttcaacgataatcaaagatgtttcaggttttttatcaatttggttaccatttgtaacaacatcaagtttcttattcagtttcttttcacgtttcattttcttaaacaataaaatatcatcgatatgtgtaaacccggatgaattagtaatggtgataaaatttcttgctatgaaatgatcatcattaagtaaagttttcattacttcagtattattcatgtgttctaagctatgtaccattaaaggtatatcccaaataccaacaaaattaaaaaattctatttgatatctagatgatttgaaaatatctgagctaatgtttaatccagaaacgttcaaagtaactttataaaaattattattttcatgattgatatgttcatcattcttatccattgaatgaagtgagaaaaccgtgtttttgacatgtgatttaacattattgattttaaattcagcttcatcaaaagcaaaatataattcaaattgatcaaaattttcaataatttgtttaattttatcctttgaacaagattcaacagtgttatcattaaaggtagatttatgaattttatcttgatttttacttttagtttcagtttttggagataatagttcattcattaattttttaaacttggtaatatctaaattgattccatgaccaacacatgtggaaactatctttgaaaaatgtgcaggacataatttttccaatgaattttgagcaataaaagtccatttaagatctttaataagtttttcatgattatcgtgtagatttgataaattaatatgaattgaatttttcaaatctcttgttttatttataccattagtttgtaaatcacaattcagcgataatgacatagtttccaaatgaagtgaagattttttattagttattgaaaaatcatgtaagacaacagtaattggtaatatccatctagcatactttaaagttttcaagagtttttcagctgcttgtgattgaatatttgcatcattactattagtagagaatgattcagatgattttgatgattttgatgattttggtgaagaagtggaatttatgttatcaactgattcgctatctgctataatatttttactcttagatgtatctatttgtaacttataaatatgaatgacaatcaaaccatcatggtgagtagcttgaagttttttcctgtgtaaataataaattggacgaatttgaatatcaattgacctaattgaaatattaaattttgataaattaatcttgacattaatgaaatgcaaccaagatataaagcctatagatactttacctcttgataaccaatgaattaacacataaagtgaaagataagcaagtacaatgtatttaatgtactgcaacattgagtttatggtaataataggtcaataaagagtgttttgttgtaacaattaagagatataaaagttgcttatataaaagaaatcaatggtgtatataatggtagtctcggaagtaaaatttattatacaatcagaaaataagcattaatttttcatgagggccgatgactttatgcataattaattgaaggttgtcaaattattagagcggatgtacggtatatattgagtgaatatgcgttgttatactggatgtggctaatgatacagatggatatatgtattatagtaatggatattatatatacatatataatgtacttaaaaagagtgaaaaaatttggttgattgatttaatcattgaggataccactctctacgagattattatgtagaattgtttctctgacaacagcaaatgctaaacgtatattatttgtatcagttgcttgtgaaacatatggaaccatatttaaattggctctattaagttgtttgaatctccaaagtatatatttaacagctttattgacattatcaccacctacataatcaggaaaataattttcaagtggagaattagccaatttatcaataaatatatcaattttatttaaacaaagtatcactgcagttttcttaaaccacattgaattaacaacagattcaaataaatttaatgattcctcaagtctatttttacttggagattctaataatgtttgatcatattcacttaatgagacacaaaatattatagctgtaacattatcaaaacaatgaatccatttttttctttcagaacgttgaccaccaacatcaaataaatgaacatccaaatcttccatttggaattttgtatcaaaaatacctgaagtttgctttcttgtacgtaaaatatctgtaacagtaggtaaataatcagattcctttatacgattaagattttcaaaaaaataagatgtagaatctaatatataaaaatcatattttgaattattcaataaatttttcactgtttcatcagttattagttgttcaattaaatttgaaacttttgaatcaaatggtagattaaaattttcctcatctagaggtacttgataatttaataagaattccaattcttcacttgataaatttgtcacttctgacgatatattatattgatttagtgcctttacaagacatcgagcagattctaccacattttggaaaacgaaaggtttatattccaatctttcattttcagagaatccatgttgatgaattatttttatttgtcttaatattgttgatttaccagattcccctgaacccaataataaaatttttgcatgtttcttaggttttacaattgatattgcaccaccaccattattattattattatttttaccctttgttgaatttctatcaatctctttactcagtttctcagaagctgtataatttgtacttgtattatcagtggtaatatcgtgtgtgttgttgttagtagtattagtgttcttattagtattattattagtagtagtattagtggtattattattatttaaagaattatcaccagccacaacctctggtcccggatgagtttccttagtgggtcctcccttggaccctgatgttttacccttagaattaggttgcccagagtgctcttttaccacagtagagtccttagagccgcatattcccattgtaaagagcttattatatataaagagagctgtattttaatagtaattcagaagaaacaggtcttaaacagaggcatacatacataaatacaaactagtaataactcgtcaagatgaatagaaaagcgaatatatgcgaaatggagacaaaaatacaatgttacgtaatcatattctgctgtctcgtttttttttattaatgtgatcttttctgttttatcttattttattttattattttattattttatatagtatttatattttatataaatagagtttattttaattaattagttatagtctatacttgcttaccaccaatgaactcactccatcttctagcttcacttggaataacaacagagtctttctttaagtctgcaagtctttctggtaatttttctttcaaacattctgcaaataacattgcagtttgtggttcattaaataatggaataccaaaatcaattgcatttcttctcatcacataatcttcatcttcaagactttcagctcttgcagctgctaaattaacaacggttttaatatcgtacttttggaaaacttctcttaattctctcttattggtctttgggaattcaattatttcaattgtggaattcttagcaaattttttcaaatattctgcaacttcctctgatgcagcataatatttatatccaatattatctaatcttgatgcaacagtacctaaatattctttacttaaatcacctccaaataatatacctgatggtggtaaaactaaattaaaattcattgttgcttgaattgttgtccaatatgcttcaattaaatctttaccaaaacatgcgatttcaccagttgatgacatttcaacacctaaaaatggatctgcacctgctaatcttgtaaatgaaaattgtggtaccttagtagcaacataattatattctttattcattaaatcaattggttctaatgttgaatcctttaataatgctcttgctgcaacttcaatgaaattgatacctaatactttagaaacaaatgggaatgatcttgatgctctaatattacattcaataacttttaaatcaggaataccagtttccttattatctgccttaataatttgcatattaaatggacctgtaattttccatgctgatgcaactttatctgcaatttcctttaatctattcataatttctttatcaagattttgtggtggtaaaactaatgttgcatcaccagaatgaatacctgcattttcaacatgttcagaaattgcatgaacaataactttaccattacttgcaactgcatcaatatcaatttcttgtgcaccttcaataaatttagaaataacaactggatgttcctttgaaacatttgctgcattaagtaatttactttctaattctttttctgatctaataactgacattgctgcacctgataaaacatatgatggtctaactaaaactggataaccaacttcatttgcaaaaatttctgcatccttaattgatgttaattctttccattttggttgatcgacattaattgaatctaaaattgatgaaaatttatgtctatcttctgccttatcaatatcttctggattagtacctaaaatatttgcaccattattttgtaattttaatgcaatattttgtggtaattgaccaccaactgaaacaacaacaccttctgaattttctaattcataaatatccatagttctttcaaatgataattcttcaaaatataatctatcaacttcatcaaaatcagttgaaacagtttctggattataattaatcataacagttttcttattattctttcttaatgctcttgcagttgaaacagcacaccaatcaaattcaactgatgaaccaattctataaacaccagaacctaaaaccataataccttcatcattaaattcaacatcatgagaacttgcattatatgtagtatataaatagttagttgatgcagggaactctgctgctaatgtatcaattcttttaacaaatggggtaatattataactctttcttaatgctctaattgataattcatcagatttaactgcaattgcaatttgtttatcagagaaacctaattgttttgcctttaaaataacttcacttgtaagactttcaattgaaccaattgattctaatttcttttgcatattaacaatattcattaatttatgtaagaaccatttatcaattttagataattcatgaactttatcaactgaataaccttcatgtaataaagcttgaccaacagctaaccatcttctatcagttggatttgataaaacatcatctaaattatcaaattgatcaccttggaaaccaacaaatgatggatcaacttgtctaattgccttttggaatgattcttcaaaatttctaccaattgccataacttcaccaacagatttcattgcagatccaatatctcttttaacatgttgaaatttagctaaatcccatcttggaattttagtaaccatataatctaatgaaggttcaaaatttgctgaagttgatttagtaacaggatttggtaattgaggtaatgtataacctaaaccaattttagcagcagtataagctaatggataaccagttgccttagaagctaaagctgaagatcttgataatcttgcattaacttcaataactctataatctaaaccatcaggttgtaaagcatattgaacattacattcaccaacaacacctaaatgtctaataattttaattgcagcagatcttaacatatgatattcttcatcagataaagtttgagatggtgcaacaacaattgaatcacctgtatggatacctaatggatcaaaattttccatattacaaactgtaatacagttatcacatctatctctaacaacttcatattcaacttctttccaaccttttaatgatttttcaactaaaatttgtggagataatgataatgattgtgatgataaatttcttaattcttcttcattatttgcaaaacctgaacctaaaccacctaatgcataagctgatctaacaataattggataaccgacttcagaagctgcctttaatgcatcatcaactgtattaacagcaattgattcagcaattggaatattaatttcatttaatgcttcagcaaataattctctatcttctgaggtttctaaagttttaattggagtacctaaaactttaataccatatttttctaaaatacctaatttttctaatttaacaccaacattaagagcagtttgaccaccaaaagtaagtaaaataccatctggtttctcacgttcaataatataagtaatatattcaggtgtaactggtaaataataaatttcatcggctaatgcatgagatgtttgattagttgcaatatttggattaattaaaatagattttttattttcttctcttaaagctttaattgcttgagaacctgaataatcaaattcaccagcttgaccaatagataaaccaccagatccaataactaaaactttattaacatcaactaaatgaataccattatcatcagtaaatcttttcattatgttaccaccttcatattgacttgttgaataaaatttaacatttctattatttattaagtttttagttagttgtctaactgttgaaagtctaaaaagttttgaaacagccatatttattaatgtacttctttttatgatctatctctattttttgaaaaaaataattaaaataataagaaatctttacttattataaaaactatatgtaaatattaataattcgactaacagcgaccgatggagaaggaaagtaaagcaaaagttagaagattttaaagagctaagacaaaaagaagaaaggttatgaaggagatattaaattgcaaaatttttcactttcttccatcataattaatagaaaactcaacttcgataatcaacattttttggtgagtcagtgaaaataaaattaaaatccgcggtttccgctcttacctttttaggaaggagttgccaaaataggtaatttccaagcgcgcttaatttttcatctattatgcactatcgatgatgcaattttgacaggattaccgttattattctagttttttgattagtgtataagcttttttgttaatggaaaattatctaatctaaacaattaagtattattaagtatattggggtataagtatcggagtatattatattgtgtttaaaaattagtctctcttccatctaacatgaaatgcatctcttgcataatagataccacctaaggctaaattagtattccattgatcaacccatgaacaaagagcactacataatgcaatctctcttggaattttagtttcatcaacaattaaattaaaaccaaaattacctgctggaacaactctaccaactctttctctaacttcagattctttttcaccaacatttttaactctttctaaaaatttcccctctgttgtccattggaaaatattaccatcagaaagttgaaacattctataagaatctaatgcatcaactttatgattaattgtatgccaacctaattcagcagctggtgcattaggtgatctaattaataaaacattagctcttaaaccagctctacaagttgcaacaggttcatcttcattatttggacctgttgatctaatttgatttgaatacattttatatgcaccttttacagctcttgatctactaaaccaaaaaattgaatctttttgagatgttggacccattggtgatgaattttctgcttttgtatcataaacatcccaaatttttgatcctgtaccaaatctttttctatatgcatattcagaacatttagattcatccaaatcgatataatgagggatatatctacttgaacgacgatgtggtgataaaagaatagatttagcaagaatcaatggtctcataacaggtctcattaaaagttcaacaggcattttgtttgaattattaagtttttatatttaaaggttaaagtactttttaaaaggttacgatagcaaaggcaattaaaatagctgctgctgcttgaataagtaagataaataacagtaaatgtaatatcaagaagaagaaatagataaaagaaggtatatcaaacaaggtaatagcaagagttgcccttcactattacaagtagagactgatttgatctgataaaacggggagagaacccagccaccagcgaatatttttttctttcctattttgtatttttttccattgctcttatagttattttaatgattataggtattgttgcagataatagtgtttctttgatcttggttttgttttgtttgaatagttagactacactattttgcttaaatatagatatatcacacactcataaacagtaagggaaaatggctgatataacaggacaggccaatgatacatttaataagtcaaagttaggagatatcacagaattacaagattattatgatgcattaaatgaactggagaaacaaaataaacatctgcatgcatttgatactggagtaatggactctaatggtaatgatcttcaatctggtatagatagatggccaacactttttgaaattttaaataaaaaaactcaatcaccactcgatctttggtctttctatgttttcatgagagatgaacaaaatgctattgattatctggatttctggattgatactgttcaacatattaacttatgtaaggcatatgttaaaactttaagagattctctggctgctaattcaagaatacgacaagctgaaagagtaacggatgtgttaaatagtaatactaaagatattaataatgaaactagtaataatcctaatgaaactaaaatttcaattgttgatgatataaagccaccacatacaagctttagtatggataatcttgataatattgtcagtggtggtagaaataatcatcctaatagaaattcacagaacagtagcagaaattcaagatcttcatcacaattgttagatctcttaatgaaaaatgatatgtttgaaagtgaagaccctcatagattatctttgtttttaagaggtgaaactgctattagaacaagtgatccgttagttaatgctaaacttgatgaattgaaaagaagatcgcaaagttttattaacacaagtggaaataacttcaataataataatgatacagctcctactataataaatgatttcagttcagaacaagatttaaccgatttaaataataaaactaatttaagaacatcaagaatcaatcctgaaatggtggaaacatttattcaatatgacattgatgcaaagcaaagagattttaataagtcacatctgataggtagatcagaattaagaaaatctacaaacagtatattaactacttattttctagacaattcagaaaagaaaatacagttacctccgtctatagttgaaaaggttaaatatgcattagaaactgaaggtagagatgatcctgaagtttttgatgaagcaagagaatttgtttttaaatcaatggaatttgatgcatatccaaatttcttaagaaatcatgcattgaaaaatgttacaagaaaatctgcaatgataaggttattattatctatgatatgtgcactgggtgcattttgggcaggttatacattaatatttatggattatgaacctaaaccgactagagcggtcgttgttataccatttttcttcatgtcatacttgttcttttcttcattttatagaattgatcctttcctctgttttgctggttatggtgaaagtattgcaacacatggtggtcttatacaattacgtgaaaaatatgttagaagtattttacaaaaaagatcaatatttgtattgactatactgtgtttagtagctgctgcttttagtataatatttgcacttgttcctggtcacaggcttcaacattcatgattttttatcttttttactgctttataaacatttacctcttatttactgctctttaatcacacacctatattagcactattgtcatagacataccaccttacataatcaaagcaaccaattttccgcggaaagttcttgttttttgttaccaacaacgacaacatgaatttgagttaagttgacgaaactgcaaagactacttttcttttcccttttcgtttgtagaacaagctgtaactacgcatacacagctatataataacctattgaatgcgtggtggccatctaaacggtaaatactctcctgctaggggtggtagatcttttagaggtaatagaaacagtggatactatcaagaaccatattatagctcatcaccaagaggtggtggacgagctggtagttataatgtatctagttggcctagtcgtggaggtagaggagggggtacaactggtggttaccatagtagtcctgtatcatatcctcatatatcatcagaacctccatcttcagctgtaaataacaataatcttagccatattaataatgctggtcataacatttcacataataatgaaataaatacatcagtagaaagtgtggggattaatgaatacaatacatctggtgctatgggtgaaaataatggaagttttgcatcaaatagaagtgaatcatattataacaatcataatagtactactagtaaccatatagataatggttatggaagaggtggatttggatcatcaagatttgtatcacgaggacgtggaaggggtcgtggtagaggaggtttatggaatagctctggtggtttaggacgagagagtcattattatcaatcaggtggtaatgctaataatggatattatcataacgaacagaatgtcggtaatgaatctacaatatctaatacttcttattatggacagcatatttatgagggatataatggatcaccaaatggaggtggttacccaaacttatcactgaaaaataacccttcaactaataatactgctgttccaacaaccaatactgctgaagtatcaaataataatactaataatatagaagataaggccaaaattgaagaggaggaaaggaggaggaaagaagatgagaaggtcaaacaggaacgtcaacgtcaaagagaaattgaatttcgtgaaaaacattgggttggtagaattcaggcaaagggagatattaaaaattcattagttaaacgatttgatgaactggatgaaattaactcaaacttgctagatattgattcaaggaaatttgggttagaaattgaaattaatagacttgcacggattttaaaagctgaggaagatcgtgtacgaattgctgaagaaaaacttgaagctttggatctatcacttgatgtgtaacttgcgtctctgatacgcgtgtataatatgctacattcttgtaataataataataaatttatgataataataaagtaataatgtaaatgtagtccttatagattagaccgaaacctcgggataattatttattgaattttagatatagcgtgccgacagttttattctccattttttaatatataatctccgttttaatgctttattataactcattcctttcaacaaataaataataatgtcattacttagtaagatctgtaattgtgaatgcagtttaaccaatgcatttctttggactgcattagctgttggtattattaaagttactagatcagctttatcatttttcacaattattttagaatcttatattttacctggtgttaattttgcaaaatatggtgcaaataagggtaattgggcagttattacaggtgcatctgatggtattggtaaagaatatgcatttcaacttgcaaagaaaggttttaatattgttttagtatcaagaactcaatctaaattagaaattgttgctaaagaaattgaaaccaaattcaagaaagaaactaaaataattgcatttgatgcatcaactgatgcacctgaaaactatgaattattatctaaatcattacaaggattacctgttactattttaattaataatgttggtcaatcacattcaattcctgtctcattccttgatacaacagatgaggaaatgtcacaaattattacattaaataacattgttacattgaaggttactaaagttgttgcgccaattattgaatcaacaattggtgataagaaaaaagttcatggtttaattttaacaatgggatcgtttgcaggtcttgttccaactccatatttaggtgtttattcaggttctaaagcatttttacaaaattggtccgcatcccttgcaggtgaattaaagtcaaagaatattgatgttgaattagttatctcatacttagttgcatctgcaatgtctaaaattaagagatcatcatttactattccaaatcctaaacaatttgttagtgcaactttaaagaatgttggtagacgtgttggtgcacaagagagatttgctacaattacaccatacccatcacatgcattaatgcattggggtatagaatcatttattggtgtttattctaaaattgttaataaaattaatcttgatatgcataaaagtatcagaattagagctctaaagagagctgcacgtttagaagcagaaaagaagcaattgtagtttaagtttattttacaaataattctaactatatattataatacaatttattgattgatatatcctatacttgtagatctatcgtatatattccataaatatacacgtaaaacaccaagctattaagagaacacgcaaatttcggaaatttcaaattttcctcatagagaaaaaaacgtttgttttcttttcatttcacaagtgttctaagtgaattgttaaaagaatcaacaggggtagataatagaaagcatctcttgttggttttatacttttgtctcttgtttctgttatcaaataacgtgttttttatagatagtgtggaacaatatggaggttaatgattttgatagacttgaaaaaattggtgaaggtacctatggtgtcgtttacaaggcaattgacaccaaacataacaacagaactgttgcattgaagaaaattagactagaatctgaggatgaaggtatcccatcaactacaattagagaaatctcgttacttaaagaattaagagataataatatcgttgcattattcgatattgttcattcaagttcaaataaaatttatcttgtctttgaatatcttgatatggatttgaaaaaatatatggaatcaatacctgaaggtcaaggtatgaataaaaatatggttaaaaaatttatggttcaattagttaaaggtatctattattgtcattcgcatagagttttacatagagatttaaaaccacaaaatttattaattgataaagaaggtagtttaaaagttgcagatttcggtttagctagagcctttggtgttccattaagagcatatactcatgaagttgtcactctatggtatagagcacctgaaattttattaggtggtaaacaatattcaacaggtgttgatatgtggtcaattggatgtatatttgcagaaatgagtcaacgtaaaccattattttcaggtgattcagaaattgatcaaattttcaaaatctttaaagttttaggaactccaactaaagaagtttggcctgaattagaatatatgagtgattataaggaaactttccctaaatggaagagacaaaatttagcaagtattgttacaaaattagaccctcctggtattaatttattacaacaattattagcatatgatccagctataagaataagtgctaagagagcattaatgcatgagtattttagagttgatgatgataatcatcatcaaatggaatattctcaaccttcaggtatgcaagttgattcatctacattatacgcataatttataatttaaacttttccagttcagcatttcttttctatttatcaaactaaactacaatttttactttcccgttctttattatatataataaaatacaattatataaaaaaatttagataacgatatcaaaagagtttttgagtatctttgaaaacattctccttttccttaattttgtaagctccaggaaaaatctctgggaactctctacaatattcataaaatatccattttctttgatcccagttagattcaacaggttttaccttattcttcatttttccagaaactatttcacattctttccaaactctaagaatattcatgcccatcattttaacaatatcttcctctgttgcacctgttgctttccaaacttttttgattaaatccggatatttagaaacatcctctaatcctacaggaccttgaggtatgccatcaaaatcagaaccaaaaccaacatgatcccacccaataagatcaacaatatatttgatatgagcaacagcatcatcaactgttacttcatcatgtccttcttgcttcaaaaataatggaaaaaaattaatacaaacaactccaccgttctctttaactaattttaatacatcatctttaacatttctcccatgtttggttagtgaatatactgaactatgggaaaataaaacaggtgcttttgtgacttttaaaacatccaacatggttttatgtgatacatgacttaaatcaacaatcatacctaatctattcatctccttaatgcaatctttaccataatctgttaagcctttatcaggtaaaccaccagtaacagacgaagctgctgttgcaaatgggttgtcacaattatgagtaagggtaatgtaccgaacaccaagatcataatactgtctaacaactgcaagagaaagatcaacttgatgaagaccttcaatacctaatgtaacagatatctttttatttccactatctctatagctagctaatgattcatcagcagtatgcacaaatttgaaactatgtgaatattcatccacaagtctctttactacatctatttgttccaatgtatctctaacaatattgtttggttgatcaaaatcttgataaaacatattatcatctttacattcaatccaacaactaaaaaactgaacaccaattttaccttctttcattttaaccaaatcagtatgtgttgttaataatgaatcaaaattaaactcctttgttgtttcaaattcattatgtaattgtgcacgtaaattatatgggaaattattgtgtgtatcaacaattgggaaatttgaaataatattattaaactttttttctatatcttcaacactataaactgtcatgattttggatagtactgaagtgaagaccttaaaaaaaagtctttctttaatccaaagataactagaatcctctgtcattatattctatctttatcttttagtaactttattttgacatattatttgaccgattatcattgctattgttttggttgatagtgagtgaaatattataatataatcacttacgctgtaaccgacaattgtcgacaatatcagcggctgtattatttatccaaaaagaactatctatagattagaataaatacaataaaaccgataattaagactacttaatcggaatatcaaacaacaaagaaagccactgtttgtcaaactctgaagatcatcgctatcaggcactattataatctgatgataagataaactgagctgataagaaaaaatatttttgcgatgcgtaaagataacaattttttttacagagataaggaagaacccttatttttgacatgaaataagaaaagttttaaatttattcaaccgatctaataaatttttataaatagtgatctcatagttaaacaatgttatagcttgcagcttctaaaataattattgtaatatttatttgttcccattatataaacactaaaagtttgttagaaaaacatgctaaatataacacagcaagcctcacatattccagtagaagctgaactttcaagtgctttcttcagtgatgaaaaccaaagaattgatgatgttttagaatctggtttaaaagcaggtctaaaaaatagaatgattaaccttattgcattatgtggtatcattggaccgggtgttttcattggtatgggtaatgcattagcatctggtggtccagttggtttacttgttggattctcaattgttggtatattaatctttttaatgatgggatcaattggtgaaatgaatgcagcatttgatcaaaattttgcaattttaggatcaaaatatgtttcaaaaggtttcggtgcaacaattgcaattttttatgttgttatttggattacaaatattataagtgaatatacttcattgacagctgcattagaaacatattcatcaacagttccaacatatggttggtacttaattttttggttcattttcacagttttccaatgtcttgatgtatcttggtggggtgaagctgaatatattttaggtttcttaaaattagcatttttatcaggtttttacatttttgctattatttatgctgctggtggtattaaagatcataaacctaataattcttttggtaatttcccacttaaagatggttttaaaggtattgcaagttaatttgtttatgcaggtgttttttattcaggtattgaaggtatttcagttattgcagcggaagctagaaatccaagaaaagcaattccaacagctgttagaagtactatttttagagttttctttgtttattttggcttatcaattttttatggtgttacagtttcatataatgatccattccttactgaagctgataaagttatgagatcaccaatgacaattgcaattacagaagctggatggccagggtctaaatatttagttacaacaatgatttggattacatgtttctcttcaattaattcagcaatttattttgcatcaagatcattatttacatggtctaaggcaggttttggaccaaaaatttttacaactgtcaataaaaaaggtgttccatatgttgcaattcattcatgtcatatttttggttttttatcaatcttatcatattcatcgggttcaacagttgtttattcatatattgtttcagtttctggtgttgcatcatttattgtttggacatcaatttcagttacacatttaagatttagaaaaggttggattgcacaaggttattcagtagatgtattaccatttcaagcctatttttttccatggtctaattacgttgggatttttattggtattgttttaacattagttcaaggctggtcatgttttaaaccatttgattataaaatatttattgatgattatattatgctaccattattttttattatttggttttgttatgatttcttttattttaagaaaggtataattaaaccaatggaaatggatttccatacaggtaaaagacctgatcttgatgataatgttggagcagaattagataattatgatgcaagtggtgaaaaggctgatgtgattattcatacctcttcatcaaatgaaaaacttacctgatatgtgtaaattagcttatttcttatattttatagctttcatactttaatttttcctttgtaactaaactaaattttattttgaatctacagaaaatcaatttttacatttttataattttttactaataataatattgactttttttttacatattctatagtctaataaacatatactaaactttcaatctttaaagtatgatccattttagttagaacgtcataactcaaacagaaaatgtaaaaaacagcagctaaaaaaatttaaaaaataacacctaatctaccgcagcaagcatcaaatttttaacagctgtaagggaataaatacaagttgttcaataatatccacgtgaagattaggtaagctgattacgtaaagatgataagatggaaataggaattccgagatacggaggttcggagatgtcggagtaagaaaggaatgacttagattgaaattgaattaattatgataaggagtggtatgattgataaggaatagtttaattaactatattaaggaatggttaatattgtaatataaataagtatgatatcctgtataactttgtataactctcttctgagaggggacattaatcagagtattagttagagaacaatctactaattaataccaaccgtctcattgctactcgctgtctattacacaaataaaaggtccaacgagtaaacttagtttatacttattacttccattacgtaattaagtattatccactatcttacatattttagtttacatttggtagcaccggctagtgtttgtgttcctaattaaatcaaattatattcatctattaattaaattaaatcaactaaaaatgtcatctgctaaagataagattaatgctttaaagcaacaaattaaggaaataaaattaactgaaaagaagaagaagaaagaattatcaaagaaacattctaccaaacattcaaagaacgttattaaaaagaagaaacatattaaaccacctcttagaattatccattccgatcctgaaatgtctgattattcatttgatgatgctttttcctcagataattcccattctgataactccaattctgattctgatatttctgattccgatactgatactgatgatgataataaaacttctaaaaatgataaacttagttctaactttccaaaatttgatggttcttctactgatgataaaggcaaggaattctccactactgaagctcaacttaaagcaaaaacttggttatctaagttgcacgttaatttaattgataaaggtatttcaaaatcaagctgggctagaaaagctattgttaatctcgaaggtagagcatacaaatgggtagaacataaattagagaagaatccaaagtatttaaagatttcctgggaaagatttttacgtgatttcaaaaaagaattttgtcctgttattgaagatgatatgcatgctatggattacaagattctaacttttaaaatggttccaggaatgaaagtctctacatattctgatcaatttaaagaatatattcaagaattggattttgaagaatctactaaatttcaaatttcaagatatttacttggtttaacacctgaattgaaaaagatggtatcccaacaaaaacctcgtaccttgaatgctgctattcattatgcagaagattctgaagctattttgaatgatattgaagaagcaaaaccaaaaaatccttggatcaataatatcgaacatcaaactcctgttagacgctcttattctcgcccatatagagttaataaatataaacctggttatcataataagcaaagatttttcagaaacaaaagaccatttaaaaggtacaattcaaattttaccccaatcggtggtaatcgttccatgcatttttctcgtcctactaaactaaataataaactatctaataataataatactagttctttttcttatattgcacctccagtaagtattcaacccgaagttgatcatttaaatgtcgagaaggaagaaggtgatactgttgttaataattctcaaagggtgattccaagagatgagactattaagaagggtgattcctctgaagttaaattgttaaagggtgattccaaacaagaaacaaatagtccaactttaaacattccttcattacctgaaattttacatgttaatgctttgaatattgaaaatttacgaaaaatagatgtacaaattgataataaaaattccgcatcagcaattattgatactggatccaatacagatgctattactacaattttatgtgatgaactgttattatcaagcaagattagattatatgttgaaccaattagtgctattttagttaatgatactgttgatgctattggtgaactagatatagatattgatgttgatctatttaataatcctatcaaagaaaaaagaacatttttagttttgcaggcaaacaccaagaaattaattttaggacttccatttttcaaacaacattatgataagttagatatacatgattttattggagatagttttgcaacaccaagtgttaatgttaatttaattgaatatcatgatagacatatttctactattattaataataaagataatgattcatatctaatatatattaattcaatgaatgttgaatcctctgaagaaaatgatattaaaactattgataaagaaattaataatgttgaagttaataaatacagaaatgatattttagaaaaatttaatgatgttgttactatgaaagaaccaaatgaacttcctcctaaaagaaatcacgaacataaaattattttagttgaatctaataagcaagttaatagaaatcaatatcctttaagttattcagaaaaggaagaattaaccaaaactgttgataagttaatacaacaaaaatttattagaattagtgatagtccttataatagccctgttttatttgttaagaaaaaagatggaaccatgaggatgtgcattgattatagattgttgaataataacactgttaaagatagatttcctttacctcatatagaagaaattatttccaagtttgaatctgctgttgtttattccaaattagatttaatgtcaggttattatcaagtaagaatccaagaagaagatattccaaaaactgcttttagtactgattatggtcattatgaatgggttgttatgccttttggtcttactaatgctccagcaacttttcaacgtatgatgaatactatcttatccaaatatttgaatacatgtgtgcaagtttatttagatgatatttttatttattccaaatcttataagcaacattatgaagatattaaaagtgttttatctacattaagagaacatcatttaattgctaagaaatcaaagtgtgccttcttttacgatgaattaagatttttaggtcatgttattactaaaaatggaattaaaactgatccagataaaattgaaaaggttaaaaattggccaattccaactactgtcaaagaagctcaaatgtttataggtttaacttcatattatagacgttttatcaagaatcattctaagattgctgtaccaattcataaatttattaccaaagaatcaaaatgggaagatgaacaaactaatgcttttaatcaacttaaagacgctttaattaacagtcctattctagtacatccaaaatggaataatgattgtacttatgttgttcatactgatgcttgtggtagtgctttaggttatactttagaacaattagatgaaaatggtaaaacaagaggtacaattgcttatggttctaagaaattaataggagctcaattaaattatggtatttatgatagagaatttatggcagttgtagaagctttgaaaaattggagatattatttattaggtagacattttgttattgttactgatcataaaagtttaatttatctacgctatcaaaatttgattgattcaactagggttgcaagatggcttgattatttatcacaatatgattttgaaattcaatatgttgcaggtaaagataattctgccgcagatgctttaagtcgttatccatatgaaaaattgtctgttaaagatgctttagaagttaatcatattaaatttttaggtaattcaaatagaaattcaaataataatattcaaattaataatactgaagttactgttactacttttcctatgaatgatgaattaaagaatttaattattaaaggttataaaaaagataatgtacttgctgatgtttattcaactttgaaaaataaatctgaaattcctattcatttaaaccaccatattaaacattatcaacttaaaaatgatttactttattataaaacattattagaacaagattgcaatagattagttattcctcgttataatagtttacctcaaagatttattaaaaatgctcataataatcctacttctggtcattttggtccttggaaaacttatcaaactttaatggattcattattttggtttaatatgatgcctacaattaaaaggtattgcaatagatgcattgtttgtcaacaaaataacacttctactcagaaaactcaaggattatttcaaccattacctgttcctgaaggtagatggactgatgttacaatggattttgttactggtttgccaacaactacttcaaatcatgatatgattatggttattactgatagattttcaaaaatgtcacattttattccaactgtgaaaactttaactgctgaaggttgtgctaaattatttttagattattttcttaaacatcatggatttccaaaaagattaactagtgataaagatattaggtttatgaataaattttggtatactattcattttttctttggtgtttctttattgttttcaactactaatcatccacaaactgatggtcaaactgaaagagttaataaagttttaaatcaattattaagaaaacattgttcaaatgatcatttacactgggatgaatttttaccaatgtgtgaatttgcttataatagtacttaccatgattcaattaaatgttctccttttgaattagctataggatataaaccagattctatgaaaagtgttaatagttggaatttagatgataatagatatagtccaaatgctcaagaatatgctagacgtatgagattaactttaactcaagctcaagataatattgtacaagctcaaagattgaatgaaaaatatcataatagatcacatagatttcataattataaagttggtgattatattttattgcatcgtgatgcttttggtgcttttgctaaatattataaaattcaacctgcttattatggtccatttagattggtgaaaaaaattaatgataatgcttttgaagttgatttacctaagattaataaaaaggatagagtattaaatattaaaaattttcgtccatatgttcctccagtcgatttattatgtcgtccacctagaactaatgctgaaattttatcaagaattaatcaaatgtgtggtattgctggttttgatgaagaaaagaatacttttgatgtttattggagagattgtgatcctttacttgctacaactattactgctgatcaatttaatacggcttcggaatcacttcgtcatagtttatttcataatgccaagatgatttgtgctcatgagcaaattgtttaagtatttgatttaatttaattttaacatcagggacgatgtttcccaacagccggggtaatgtaagggaataaatacaagttgttcaataatatccacgtgaagattaggtaagctgattacgtaaagatgataagatggaaataggaattccgagatacggaggttcggagatgtcggagtaagaaaggaatgacttagattgaaattgaattaattatgataaggagtggtatgattgataaggaatagtttaattaactatattaaggaatggttaatattgtaatataaataagtatgatatcctgtataactttgtataactctcttctgagaggggacattaatcagagtattagttagagaacaatctactaattaataccaaccgtctcattgctactcgctgtctattacacaaataaaaggtccaacgagtaaacttattttatacttattacttccattacgtaattaagtattatccactatcttacatattttagtttacaacagcgtaattgcacgagtagctcagtggtagagcagcagattgcaaatctgttggtcgctggttcaaacccggcctcgggcttattactttttattttttttcatttagtaccttactagttaaatactccacagtaacttcacaaagtaaaatttaaattacgcaagatcacgtgcgattgcagatttctaatagtatttactataagttatcattttacggacatgtttttcagttcatttaatttcatttcaattaattactttcagttatttgccttccaattcttccttcttacgcttctttttcttttattttgattatctcctttttaaataacttcaatcaacccaattaaactcaattaacaatgtttgcaagatcaattatcagaaattctgctttcaaggcaccagttagaagattcatttcattcgatgcagcttcacaaccaagaattagaattggttcaactgcaccaaatttcaaagctccaactaccgttggtgaaattgatttccatgaatatttaggtaattcttggggtgtccttttctctcatccagcagattttaccccagtttgtacaactgaattaggtgcatttgctcaattaaaaccagaatttgatcaaagaaatgttaaattaattggtttatcagctgaaggtattccatcccataatgaatggattaaagatattgaggaagtcgttcttggtggtaagaaattcactttcccaattattggtgatgaatcaaaggaagttgcttttaaatatgatatggttgatgaagcaggtttcaaagatttacaaaaaggtgcaacaattttcaccattagatcagttttcattattgatccaaagaaaactgttagattagttcttacttatcctgcttcagttggtagaaatactaatgaagttttaagagttattgatgctttacaaaagggtgatgcaaagggtattgctactggtgttaactggcaagcaggtgatgatgttattattccaccatctgtctcaaatgaagctgcaaaggaaaaattcggttctttcaaagaattaaaaccttacttaagattcaccaaggcttaaatgaattcaattatctatttatttaatatattatatacattctatatatctctacttatgaaacgttattaaccactactaccaacattaacaatacagtaactgatactggttgattgcaatttatctcgcaaaaatattttttttggggttttcacttcttaaattttcattccactggttaaatgttatttttgttattatcaaaacaagcattaatataatcttcccataaccttccgaattatttaaatttcagtactattattatctaattaattaaatcacatataagaaatattcccataatggtaatgaaaaaggagagtgatatattaccaaaaccagaatcaataaatcgatcgacactggatcctataaatcaaatacaagtacaaaatcaagtacaagtacaagatcaacttcaaaatgaacatcaacatatcgtacctgcaatagaggctgaaaagcctctgcctaagaggaaatcaacaaccaatacaagaaatacagccccaaagaagaaaagaaaagctaacattaataacaataatgataaatcccctaatgatgatgaatttaatgatgacgattacgatgatgatgatgaaaataataatgaaaacaatacaaatacaaatacaaatactacaactgtaactaccacaaacaatagcaaaaataatactaaacaaaaatctaattctgctgctggtcatagacctgttacttcatgtactcattgtcgacagcataaaattaaatgtaacgcatccgaacaatttccagatccttgttcacgttgtcaaagaatgggattaaaatgtgaaattgatccccaatttcgtccaaagaaaggttctcaaatacagtctttgagaaatgatgttgatgaattaagatcaaagattgaatttttaacaaggaatgaaaatttaataacaaaagtattacaaaatactccatcacagaaaattttgaataataataatagctctaacaataatactagtaataatgccaatgatgaagctaataaaaatattataaaggataaatcaccttctttaattgctaaaactttattacaaaaggaacctgtattgttaagtttagatgctaggtctaattcaacacaattaataaatgattctgcagtacataaaacagatttaaatgctgcattgaataatgttggaataattaacaatcaatcagttcaattcgattcaaatagaatttcaaactcaaataaagagatcaattcgtcaaataatggtaattttccagaacaaatactttcaaataattcagtttcaaatttaacaaaattaacaacccccgtaaatacaaaatcaatttcacagaataacctcctttcaaatactcaaatatctgaatttatattaggtgaagttaaaatttcatttgagaaagcttcaactttacataaaagatttattgataattatttaccctatttaccaattatggtatcaaatgatccaattgaattatatcaacaaagtcaattgttattttggactgtaatgttaactgcatgtttatcagatcccgaaccttcattgtataatgaatttgcatcacttattaaacaacttgcaattgaaacctgttggattagaactccaagatcaactcatattgttcaaagtttaattattttaagtatttggccattaccaaatcaaaaagtcttagatgattcatcttatagatttattggattagctaaaagtttatcattacaattaggcttacatagaggtaaatttatgactgaatttactagaactcaagttacattatcagatgctgaaaaatggagaagtagaacatggctggctgttttcttttgtgaacaattttggtcgtcaaatttaggtttaccaccaagcttacaaactgattatttaattgaaagtgctagagttgatgattcattaccaaaaaattttagatgtttaatttcattagcaattttccaagcaaaattagttaatataatgggattaaatgtttctggacccgatggtttaatggaaccatcaaatagagcaattccacttaatattatggaaagggaattagagagattatcattcaaattacaaattgatgatttagttattgaaatttattatttatatgttaaattaatgctttgtttatttgcatttttacctgatacaccaagtgaagatcaaattaaatttattacaattgcatatcattcagcaactagaattgttacaatcatttctaaattattagaaaataaacaattaacagaattaccaatttatgttcgtcattcagttacaactgcttcacttatattatttagacttcatttgacatcatatttaacaccaaaatatattgattcatcaagacaatcaattgttacagttcatagattatttagaaatatgcttgcagcttggaaagatgttgaaaatgatatttcacgtactgcaacagttttagaaaaattaaatattgtaattataacacaccctgaactattcactgaaactgaaggaataattgtacgtatgagatcacatttaactggttctttattttatgatttagtttggaacattcatgaatctcgtagacgtacaattgaggaggcaaagaataataatactggtaatactaatgctaatgatttaaattccaaagttaagatcaataagaaaataaggaaggcattaccattaccattttataatcaaattactaaggatgattttactgcaattacaacaacaacaccaaatggtacaactataacaacattagttccaactgatcaagcaattattaatgctaaagtatcagcatttaaagcaggactttctaaaccaaccgaaattaatggtattccattatacatgttaacgtctactggctcattaggaaacaaagcgaaacagaatgcaaataataataataataataacagtaataataataatgttaatacgagtacaaatactactactaatatcaaagtaaataaaccaactatgaaacaaacaaaggttacaacttcacgtaggaagacaattagtaattctgatactaaaggacatgttccaccaccattatttgcaactgcaacaagtagtagttataataataagaataaacaaaacagtagtgttcaaatgagtagagcagtttcatatgatactagtatgaacaaaggcaatgaagaaatagggagaattattaataattataatatgaagaataatactactgataatgcaattattaatgatgatgtgagatttaagaatgcatttaagaataaagaaaatgatttcccattaactacaccacttgaaaaggaagagaatgaattaactacaccacttgaaaaggaagagaatgaattaactacaccaatgagtatcaatggattagataagtttttccaatcaccaattagtgaaattgataataatggtacaattactaaaggtaagaaaagaacaccaatgagtcaaagtcctgccgattctgatttattagatgaaatgtttattgattcattatttcaacaaaatacaagtaagattggtgaagaggataatgatgatttacttggatggtttgatatgaatatggcaccagaattttaattaatattatggtatcgaaagcattttaaaatatataacagtatagaataaaataagtaatagaataatattattcatcttcataattttcagattcatcagttggatccattataccaccttgaccaattgcgaaaacacaatcagtttctgcaagacaaggggaatcataaattttacaaattctatttgcacctttaccctttttaaaatataatctagtagttgaagcatgagcaattatattaccaccaattggttttttcggatcaggattaaacattgcaccaccatcaacttgagcaacaacttgatttgttataacaactgcaataccaaattcatcagctaatctttgtaaagttctcataaatttagcaacatgcatttgtcttgcacttaattcacctctacctgaataatcagttctatataatgccataattgaatcaacaattaaaagtgaaaatctactttgagccatcatttgagctgcttgatttaataattgtaattgatgatcagcattataagctcttgcataagcaatattttccattgcttcattttcatttaatccaaatctacgagcaattggtacaatacgtacaggtctaaaagttgattcagtatcaataaataaacatttaccttcaccaccacccatttcaacaggtaattgagcggttacagctaatgtatgacataattgtgatttacctgtacgaaattcaccgaaaatttcagtaattgcaccagtttctataccaccacctaataaagtatctaattgttttgaaccagttgttagagtaattaattctgaacgacgttgatgaaattcagttgcagttgtaaatccaagtggaacgattttacttgcctctgaaattaatttatctgcctttaaatcagatatacctttaattgttgttaaaattttctttggtgtataggcaattgattcaactgtacataaacctgattcttgtaatttttcaatatcttttttagatataccgttaccaataagtacatcaatcggagatggaccaatttgaccttcatcttcatcatcttccatttcatcatgtccatttccatgtccatgcacactactattttcagtatattcttgaacattattattaattgaagttgcatttgttgtattatcaccatttgacattgacgcgtcagttactgatatatcatcatctaaatgagcttgttccgttggttgtgaatccactgataggtctatagcttcctgtgtcatttagtttatgtgttactactctaataagtctataaccctttcctaacacccagaataagacaccagatacaaagataaagaactgatccaaagatcaaattatcaggagaaggcgaaacctggaaatttaaaataataatatcaaaacttacgtaacccaatattaaatttcaactgatgatattaagaagagacactgagggcaaactattgaactgtatctttatattataagggtagaatatactaaatagacaaacacaacaacaatagaatttagataataatatacaatgagtgatcctttttctattaatggtggtactgcagtggcaatggttggtaaagattgtattgctattgcatcagatatgagattaggtagtcaatcacttggagtttcaaataattttgaaaaaatatttaattatgataatgtatattttgcattaacaggtctagcatcagatgttttaactgtcagtgaagaatttagaatgaaaacaaatttatataaaatgaaagaggaaagaattatggaacctgaaacttttgcaaatttagttagttcatcattatatgagagaagatttggtccttggtttgttggtccaattgttgcaggtattaattcgaaaactaataaaccttttatatgtggatttgattcaattggttgtattgattttgcaaaagattttatcgtttcaggtactgcaagtgatcaattatttggtatttgtgaagctttatatgaaccaaatatggaaagtgaagatttatttgaatgtatatcgcaatctttacttaatgctgctgatagagatgctttatctggttggggtgccgttgtttatatagttacaaaggataaagttattaaacgttacttaaaatctagacaagattaaattagtttatatagttcttatttatggtatattatatacagtgatttaattttaattcaatttagttacagaaatgtattgtattgtattgtattgatactttcttttatttttcagttgttggagtagtttctttaagtttattcttgtattctaattcaataactttctttaaataaccatctttaccccattcttcttcttcccttaattttttcttttcttctaatattttattcttttcacgtcttttaataatattttcacgatcacttgcaagtctactctcatgtaaacaagttgataattgaattttaacatcactacatttacctaaaacagtttcaaaaaatggtgatttatgacattcttcaagtgcatctataagatcttcacaattttgaaatctatcacgatcaagaattggatgcatgttgtggttattagttgtatttgttaaatatgaaaagtgaaaagcaaaaaaaaagctgtaaatataatagaagctggtcatgttaatcaaattaaaaaaattgatttgtgcgatttcagtaatcatgaattgtttagacgttaggaggtcattttaggttgttgattatttatttagtttattctattaataagtcattggtaaatgtcaagtaaggacgaaaaggaaatatttgaatttttggattcattaggggatgatggtaaagatggtaatggtaaagaagtaggtaataatagtaataataatagtagtggtaataacaataatgatgatggagaaatattagattttttagaggaattagagaataagaaagaaactaaaagggaagaaactccatcaaccgctgttacaactgaatctgttgaattagagaaggaagagaagtatgttaaggaagatcctaaggaagaaccaacaacaagagaggaacaaactcaaactgaacaagtaattgatccaattacatcaattgcatcatggtggagtaatacaggctcaacacaggtgagtagtcaattgacatcattatggggtacagcacagaagcaagcagaggaagcaattaaaatagctaaagaacaaaaaattgatacaaagcaaattgatgaattaaataaaggattaaataaaggattatcatttttcaatggtacaattaatgaagtttttgaaaaaattaataaattaaaccaaaatgatgaaactataaagataattttaattcatgatatggaaaatttaattggaattaataatttaattaaattaacatttgaagatgttttatcacaacaagttgatggaattattgatattaaagtaattgaaaatagtaaagttaaaacaattgattcatcaattaatactgaaaaagttaatttatcaatgtttaatggtaaaggtagtgatgcagataaattaattttagcaaatattgaaaatgaaattaaagaacaagaaaagaacaataaggaagaaaagaaagaaggagcagaaggagaaggagaagaagaaaaggaaaatgaaacaattatttatcttagtttacttgcatggacaatcaataaagattttgaaattaaacaatcaaaggaaattgatattaattcatattcaccaacatcatttacaatttcatgtattttaaaagatgaaaaacataatataataattaattcacaatctcaaccattaccattacaatgggccaaatgggtggaaggagaatttgaaggtaattcagaggaaattgatccaagtgattgggtttatggatggatacgtaatataattaataatttaattggtgttattgcacaagattatgttattaaaagaatgggttattaaaatgtggatgatataaagatttataaattaataataataataataatattaatattaatattaattatctttaccattatactgatcaataattttttgtaaacctttatcagtaattgccaataattgatgatcccaatcaacaacaagtggtcttttaatgggtatttcacctatattgttaggtaaatttaaattttctaaatctttaactaaatcaacattttcagtaattgaagggaatgcagatttaaatgaaactttacaaaatggatgtgtatgtaaacaattttgtaaaaatttaaattgatcttttgtaattgaagttgaatttgtattaatatctaaattatatttaaattcaacatcttttgaagtaacttgatgttgctttaatgaatctaataaatatcgactcattttattatttatatcatgatataaagtaattgtccccttagtgccttgtaaagttctaaacattgtttttttttacgttgttgttataaaaagaagagagggagtatagtattataaaagaaagaaagaagggaaagaaaggaaaggagataaagacctttatttaaacaataagagctaccaccccatacaattatctcttatccgttgaaatccgtgacaatacatgacataatcaacaaggcgtaatggaagatatactcatttatcaccatatacgtcccatcttttatgattccataatggcattgcagttctaatattatttaataattgtaaatcaatttcaccaacacaataaccttcttcattaatttctgctacaatttcaccatttggatcaattatacaagtatgaccaaaacttttccttttttcattatgttcaccaccttgagctggtaaaataacataacattgagtataaattgcacaagcttgagctaatttatggaaatgtggaccagttttaattgtccaagctgatgggaatgttaaaatttgtgcatttaatgaacgtaattttaatgataattcagggaatcttaaatcataacaaattgctaaacctaatttaccaactggtgtatcgaaaggtggtaaaattttattacctgctataactgaatttgattcttttaaaattggtccattaggtatatcaacatcaaataaatgtaatttttcatatttttcagtaatttcaccaaatttattaaaatataataatgtattaattgttttatttggatttgaaattgatggaacatgaacaccaacaactacatcaattgattgcagttcctttaaagtatcaataattggttcaataaaaggtgatgaattaattggttttgcaattgcaattgattcctctgtacttgaagctatataatctgaagcttcagggaagaaaattaatttaatattatcattagctgctttacgaattaatgaagcaacttttaaaccatttgctaaaaggtcattagttgaacatatttgagctgctgcaacacgcattgtttatatatagaagtggttaatggataaataagaaagtgtggttcaagagagattattaattggatcgataaaagagattaaaatagtagataacaattcttacgtaatcttgtatattaatattaaaaaaatatttttcccctaagtaaaatttttcagtaaacttattgtaaagaagaacagtatatcttttgttagacatacaacaatgacatcgatatgtattaatgcagagacattatgtcgtcataataagggattagaacaattaacatatgcattacatcaaattagtagaaatgcatgtcaatatgaagttaaagaaattgttatattaggaagtggtaaagttgaagagagtaaaattttaacaatttgtgcaattttacaatattttataacaccaaaatatttagtgaaggaagttttcaggaatagtattaataaattacctaataaagtatttaaaaaatgttataaaatgccaattattggtaaattaaaagattatttacaaggtacaaaggataatcgtgaaggtattagtataattaagaatattaaaagacgtaaaagagatgatggtaaagttattaaattaaataagaatgagaaaagtaccaaatttatacaaattggagaaaaggaaatgattgaaattaatgaagataatggaattccattaggtgttagagttagtattaatataaaggataagaaaatagtcaatggagaagatatttgggggtatgttggatataatattcgaattgcaaaagattatacaagtattttcactgaagcaggaggagatggatatgagaaaggaattttaattaaagttggaattaatggtaatgataagccgagaagtgatttaagtaaaagtacaggtagtagaataatttattgttttggatgtaatggtaaagaaatggaagaattatgtgatgaaatagttgttggatatggaaatagagttgaagatgcaattgttagtgttttaagtgtgattacgtaagtatatgtagatagagtaatagaaaattaaaataataataataatgtgatgatcattatataatttgtatacgatatttacattcttttttttttcttagagaaagatacagataaatacaatatgggtatacttaagaatgctaaaaaggatgcaacatatcgtaaagaatcaccaaatgagattcatgaagtaattgaatttgataggaatgaagtaattaagaatacaaaggcgaatgctaatattggacattcaatagcgaataataaggggaataaaggaggagaagataataataaggaagaagaaataacttcaccattaaaatgggatgaaactaatttaattgttaatgaaatgaataaaaattctacaatgaaaattgatgaaccaaagactccatatgagggaggatttaatccaaataatgattattatagaactgataatgaaaatgaggaggatgaagaaaaggaggaagaatttgcattaggagaaggtattgatgataaagatgaagcattaccagagattgaaaaagtggtggtggaagatagtacaaaagaatcagaagaagaatcagaagaacaacctacaacaagagaaagaccattgacatttgaagagaaacgtagagaacattatttacataagggagatgtacttaaaagcagtaaaagggagtattaatacaaggatatatataaaggataaaaatttaaaatccgatggaaataacaatattaataatatattacgtaataaaaagaagccaatagaaaaatattattaaggtgatgagccttttaaaaaaattattttattttattttattttattttattttattttatttttctgtgtcatcattccactgaggtattattatattattataattactattccgttcctttttaaaatggctttattcccctttttatgtttaattagtatattagtaattattttacttaattgattaaaattgccctgttttatttatttctatttcaagtcttccctttttttttgccctcttgattaaacatcaccttcttcttcttcttataatggatatgaataatatgaatagtatgaatatgaataatattaataatactgatataattccttctccatggtcaatgtctcatatgaatcatggtatcccaattttaaaaactaatttaacggaaaatcaattactttattggaattcttataatacaacaacttatttaactttaaattcaaattattcatcttatcttcattctcatattttattattaattttatctgcatttttcatttatccatttgtcttaattttaaataatttaaaatcaaaattttatttacctttattatcattacattcattattaattacaatttcttgtctctttttctcaattttcattaataatgtccctgatttatatcctggtatggcttatactaaaatgattaatggtttattaattttcacttgtttacaatatttcttctcattatttcatttaattgattcttattcaaattctaaaaataattccatttctaattctaataaatatttatcaattgataattcaaattttaattcaattactaatattaattcaattcttcaaaatccttcttcaaatagtagtgataccgatttttcagataataatttaggtttaaatatctcttataaagataatattcaattaaatgatatagcttctccttctgcaactttatttgatcatgattttatagatattccaaaaatttcaaattcttcaaagaaaattaatcaaaattatccaattatcgttgaaaaattatctttaattgctccattaactattttggcaaataaattatcatcttttttcaatattttccataatttatcaacttggcttttattaatttattatttcgtactcttaccaactggtattgcttgtcttaacttgttaggtaaagagaaaagagttttcaatttattagctcattttattaaaggtggtgttttctttgctttaggtattttgtctttagctagatattgtggttgttttgctggtattggtggtgcttggaattatgcttgttttgatatttcaaataacaacactaataataatgaattatcaacaaatgatgaaatttcaacaactccttcaggtattaatggtatcggttctggtggtgataatgttaaatcatctttctttattaaattaaatcgtcttatttcttcaaatagaatcatttattcatttgaagcaattgaatcattccttattttcttttatggttcaactaatgtctttttagaacatttagcttctccaggtggtgcttggactccaaaagatttacaacatgtttcaattgcttttatgtatattggtgcaggtctttgtggtttaattactgaaattaaattatcaaattggaaaaaatcattattttatagtaataatgaaaatttaattaataattcatcaaatttaatgatttcaacaggttttactccaaatcctttcccagttttcactattttttggacaggtttattaatgtcaaaacatgctcaagcaagtcaattatcaactgatgttcacgttcaatggggttcattattaacttatggttcattctttagaattttaactttcttacttatgacgttccatccaattaaaaataatctgtttaaaccaactaaacctttaactgaattaattacaagtttttgtttactttgtggtggtatggttttcatggaatcaactgatcaagttattgaagctttagcttatagaggtttaactccaatgtttacaattaatgtaagtgttggtataattagtttaattatggcttggataatgattatcttttcagttaaagattatttaaaatcaaaaatttattaaattcacagtcaaacaatcaagcaatcaaacaattatcaattatcaattatcaattatcaattatcaattatcaattatcaattatcaattatcaactttgttcctattcactccctttcatgttatcttatgttattttattccacttttatgttatccctaattattaaaattaattctcttattctaatttctaatttctaatctccttttatttctcttcttacgttatgttatttaatcttttaatgttttgtttatatttatatacaaaaaagaaaaacaaatttataaattaatttatatgaaaacaaaaaaaaacttaattataataatcaatgtaaatcactttatcttctaaatcttctaacaatttcaggtgctttaaatggtacttttaaaactgcaatttttgaaccaattgaatcactaccatcatttttattaccaactaatacttgacaacctaatgtacgtactaaagctaataattttgaaggttttaaacttaaatcacttgctaaaattgttaaatctaatctataatcaaataatgttaataaaaatacaattatatgacataaaattttatcttcttcctttggaccaattgaaaacattctaatttctctatcaaaattaattgatcttttattattaccattattattactattatttttactaaataattgtaacatataattaatacatcttgaaggtggaatatttttaaaactttcaattaatttatcacgacgatttactcgacgattaaaataaagtccaattaacattgaagtaaatgaaagtaattgtaatttaaattttaaattatcagttattaaatttgtttcatttaaaatatttttaaataatttaaaaataattgatgatttattatcttccttattaacatatggtaataaattaattttttcaataatattttcatcattataattaccatcaataaatgaattaattgggaaacttgataaaatttcaattggtataatttcttcaattgaataaatatcttcaacatttttagcattaatattaaatggtggtataactctattctcaatttcaactaatttattcatttcttccctatttggcatatttttagtagtttgtttaattccatcaattatatcaatttgtgaatcttctaaactttcactattaattttatttctacttgcttcattaattgctttctttgcctttttagtaccaaattcttcacctaatgcatttcttctttcagcatatgaaccttcaatttctttacgttttaaagttttaattaattttgcatcattaattaaatttttacttgatttaactctacctgaaaataatttactatttttaataattcttaatttattttctttaccattaaagataccaattaaatattgtgaatcattaatttcatctgcatcaaattttaataatccatttgttgattctccatgtaaaattgaattttttttagaatgattatataaatctaatttaatatctgctgatacatctcctgaatttgtgaacgatgcagctgcaacatctccactgactatatctacactaatcttacccttagtcatgtttaccccaaaaaagatgaacttatgtcagtggtgtcttactggaaaaaaaaaatttttaaatttttcatttcaacatgaatttttgttatgctgcacagggaaaaaaaatattttttccataataaaatctattaaactggaatatattactttacgacaatggaattatcaagtaatcatatatcatattatcaaatacttaaagtatccccaaatgcatcattagaagagataaagaaatcttatagacaaagattattagaaactcatcccgataaacaacaatctaataattcaaattcaacaattcaatcaattcaattagcttataaaacattatcaaaaattgaatcaagagaaatttatgataaatcattacatgatcattttatcaaaacaggtttagttaatgcaggtaatttcaatggaatagatattgatggattagatataattgatttatcacaatttaatgaaaatgataatggagaatttaaacataattgtccacgttgtacatcaattgatagtatgattataaatgagaatgatttattagataatttacaaaatgatgatataagtacaatattagtacaatgtttacattgtagtttatggattggtgttacatattcaatgattgaataaaattagtttactaaaccttgtctttttttctcttcttcaataattgaactaattgcatcacccattaattttaaatcagttaataatccaatatgtccagcagttgatctaattctaccacataattcatatgcatatttttgtccatatccatattctcttgccctccaatctccttcactaccaactctatcaacactacctttaccacaaatatcttcttcaccttcaggtctacgtctacccttttcacgtgggaatgtccatccttgataaacaacaccatctcctggtccatagaaaaatctataatattcacctcgtttaattgattcctctccatcaactaatgaatatttaacacttggaacaccatttgaaaaaatttgtgacattggtggataattaacaccttcttgatattctaatgatttaatatattcactagtacgttttaatgtatctttaagatatgaataacattcaaggaatggtaccattggtttatttaatcttttaatttcatgtaatacaattgattcggtttttggatcaattttcatctttaaaaatctttttaaagtatgtcttaattcatcatcctttatattatttaaatttaataaaccatttttaacatcatgttttaatctaatatttgaaactaatggatttaaattaaattcaatccaattatcagcattccaaaaatcaattttatatcttttaccatttcttaaatcacggaataaacacataccaccatttttaccttcttcatcttcaccaccccaacttggtggtaagaaaacataactacttctcatgaaaaaatttgcttcattacttaaaatatctttacttaataaaattgcatcagtaaatcttaatggtcctaaaatatttgaacatggcattggagttccacaataaataacaccacgaacaattgatggatctttgatcattgcaccatgtgcaactaatccacccattgaatgcgcaattaatataatacctttcttatgagttgatttttcattcattctcttaatttcttcatgtaattgttcacttaaaatatctaatgataatctccaatcataaccccaatgttttgctgtaacatttggatttgaattcagtttacgtaataatcttctagatatatcaacgggtccaatatgtgttaacattccatcaggatacatatgacctgtttcattatcattattaccaattgaatttaattcatcaacaatattttttctaccccttgcctcatataattcatcttcacgttttggtccaataagtaaacttgttttggagatatttaaacctgcctttaaaactggaatccaagttcttttctttgttttagcatcacgtaaaattgaacctctataaccacctaaaataataacatcaccctctaattcatcataaatatcaggtgtcatattagattgaaacagacttgcaactggtgacattggaattgatgataaaattcttgatgatgcagcattaagtgaagtgatatgattaattggattagttaaaagtgttgaggaagttgatgaagtttgtgccatttgttgagacggaggtggaatttgtgatgttgttaaattatcagcaagaattgcagctgatgcagctgctgcgggtattggagaatcaaattgtggaggttgttgacctggttgatttgtttgtaatggttggctctttgatctactttctaatgaattttgtatactcattggagatgctgatctattctcataaattgaagttgaatctgattttctaattttacttgtaattgcatttgagacattaattgggtttgcaactggtagaattgattttcttaatgctttgaatttaccatcatcaagacttgaaatatctctataatatcttgcctcttctaatgtatcaattgattcttgtctttctaattttaatttaataatttccctatctttaatttcatccattgttgaagaaaattctccaactatatcatcccaataaacagctacacctggtggtggatgaggacaaactggatgacttgaatgttttttggacttttcatgttgaattacacttctctcctttttctttgttcttagcacaaattttgtaactcttctagcagttttagaaatcagaggaattgaattcagacctttagacagtttactatgatgaattttattcttatgttcataagctttagtaattgatttcattgaatcagtgtaaggtggttgatgagcatctaattgagtaattcttttttcatcatcttcatcatctacataaacaattgaacttctattttcactttgactgttacttccactaccttcactactttcttcatcatcttcatcctcctcattatcatcattattcgaaaatggaaatgcaaaattgaaaacttttttagtttgttcatcatccataccatctggattaattgaattggcatcatcatcatcgtcatcggatccttcacaaccattagcaatttgatcaattgttaatacattcttatcacaattatcaacattaaattgtttactaaaacttgaagatttatttgaactatcagataaatgaattgaaggtattgcatttgataaattattaacggataaataatttggagaatttgaagtaacttttggagatacaccaccaataattgattgtgcactttctttggatattgatctttcaggtaatccaccatcttgatgatcaattgttaaatgatttttatcattatcatcgtgatcaccacaatagtctattttatgcattgagttatttgatttaatacttgacatctataaagtatataattattctggataagatatgatatgattttatgggttattaacttaatttaactaaacttaactaaactgtaaaaagcaatttaaatatctgtcagctgatgtttttgtgtttatcagatgtgataataactctaatatacgttattaagcgggataaaattataaactactacgatgataagtgtaagtattatcagttgaagtttactcttttaagacataatagatacaatatattcacaataggatagaaatacccataaggaagagatgtgaataaccctattgttattaaataatttatgtaaaagacctcggtttatattatggggcaataaaattattttcttagtactattaatatttgccactatatgttttctttgatattactttcttttctataatcaaaggcacaatcttaagtttcgtatgggaataatgtactgtatatctagtgtatactactattatatacacctttatggaatgtgtctctgtgcctagaggaaaatagagtaacctaaaaggatataaatttaagctataattataatttttttattaatttacttaaacactttgtttataatccttttcgattggttgtgttttagtaatcttttcaattacaagtattttgtgaatgaaatttatggttattttaaaacataatattttattagaaagaaggttactatacattttttttatttattttatattataacataggggggaagtaaattaaaagtaaatcaaattaaattaaatcaaattaaatcagattaattattatttaatttactcttaagtaaaagattttcagctttaagatgttgattctcctcaagtatttgcttataggaagcttcaatttcttcaagttgtgcaattcttgatttacgtctttgtctaaaagccttttgagctgctctgttttgagcagcacgtttagtacctgaaactatttgctttttaacccttgaatgtgtaatttgagaattaattgcagttggaatagtattagtattcatactattaatattattcatattactaatattattaatattattagaagcattcatactattgatattagcaatattattattaatatcattatcatttgaaggaatttgcatatccatttgcatttgcatttgtaatggatttaaacgttcttcctttgcaatgttattgatactgttattatcatcattatcattctcatcatcatcattatcatcattaccattatcattatgattagtaacatcatcatcattgttattgtcaccgttatcaactgtgtggctaccagtatcattaagttcagggtcaactaaagaatcttcaacagttttagaatcattgctgttgttattgttgttgttatcatcatcatgatgttgttgttgttgagcaacttcagcagcagcggatgcaacagatgcaacagatgcaatatcgatatcagcggtgtccatcattatatattcagtgtagttgttgttatcttattatctaatcagagttgtaaacaaaacactgtagtgattagctaatttattaggtaagaaagaaaagagaatgaattggcaaattgtgggaaatagaggaaaagtggtgataatgggaaattaataatttattattacatgaaaaatttattgagagcagtgaggatatataggtttggaccaatagaatcctcttattcggacattatacgatattgtacaattaccacccgctatacgatgtctgatcaggatcagtactttaattccttcccattgagtgggtttgattcacctgatagaagattacatagacattctataccacttttatcaaatattaataaatttagacaaaatagtagtccaattaataattattatagtaacaacaatagcaataataacaacaataataacaataacaatacaagtgcaaccaatattaacataaatactagtaatctcaatctaaacttaaataatactccaattaatattaatacatcaccaaattctgcaaatacttcaagattttttcctagtccaagtccaagtcgaaatcataataatataagtataaatcaaagtcagtttcagaatcaaaatgcaaatattagtccctcaattaatgggataaatgaaaatatatcggtttacggtaatggattatttcataatcaaagttcaccattaaggtttaatatgtttgatgagaatcttttattatttaatagcaataacaataacaataacaacaaaaataatctcaatcaagttagtaattataataatccattacctactccaacgcctaaatttgacacaagtgatatttcatattttgattttgatattgatagttttgaaataccaaaatcaagttttgttgatattgatgataatgatattaatgaattaccaattaacttaattaacaaattaaccgaatgtgaaattgatgatattggtataataggtgaggaaacggaagaaaatactaaagaagatactaaagatgatataaaagaagaagatcaaactaaaacacagaatatagatttacaattaattactaataccaatatagaagcagaagaagagactgagatagatttggatgatattgaaatatcaatacccaatatgggggatgaatttcaatctaaatatgataaagaagaatccaaatgtacaactatacgaatatctcattatattaataatataattacaagacatgatattgaatgtcataaatttaaagtaattggaggtaatgaatcaataatcaaagatattttcaattcaattggtgaattaataagtatagaggaaatagatggagagtttatagttattgcaaatatattagtatcatcattaagtaatacattaattgaaggtaagattattggtgatataagaattaatcatgaaaatataataaataacagcaataatagtgataataataatgcaattgaagatttaaatgcattatattcaaaaagtaaatcattaacaaagaataataaacttgaagtttgttggtatcctgaaagttttagttcaacatttcatagaaggggtgttaataattttatgtttgttagagaattaccaagtaaaatggtaattaatagaattagaaatggtaattatggtatgattgaaatgggtgaaattaggttaagtataccaattaataatgaagatattaataatgaaaagataaagagatcatttcttgttaatattgagattagagaattagagggagaagaaagggataataaaagaggtaataatacaagaaatataagaggtggtggtaatataagaggtagaggtagaggtggtagtagaggtagtggtaacagtaatagaggaagtaataatcgaaggtagaataataatatcaatgcatatagtagattcaatagaggatataactttatcagattcattaaatcagtttttttatttgtatactcagtgactaatgtctcatacagtgtgaatgtaaaattgttcatcattaaagttatattctattgtattgtaatattctattctattctattctattcatttattcttctttctctgctaaatccccctggatttagacttaaataataatagaattaaaatctaataatcagttaaacgacatatctgcatgactgtaacccccacacgattttgtacacttgtgtagttagataggatacaaattcagtccgcctgtcggtatataatatcatcatttagaaaataaaaagaaagtaataaaaaaaagttatagtaataataataacagactgctcatacaaggctgaaacttaacgataattgtgttgtcaacatgtatgcattcagtcggaacaattgttgaatatgtgtaatcactgcagtgttaaaagaaacaacgtagtaaagaaaggtaaaacaagtgggaaaagctattgtatttatagtaaaacaccgcgaatcttaagggtttaccctttatttagagggtttatacactagaactatacactattaagactttgtaggtttaacttactgtatttgtcaaaggtttcctgtgaagttatactgataccaacattgttacggtaacagtatatgtgtaaaagagttgttgcacctttgtatcttaattgacattcttgttctgtctcttcttcaattatttcctttacaatatctaaaaatgtatctctttcaattgtatcaaattgtcttctaataaggttaacattatattcctttaaaacttccttaccatgtttatccatgtaatctttaacactcttatgaattaattttttaatctcaatttcacttgcattacatgacatatcaattggtactaatctttgaacgtatctaccacctttaacttcaccatttttaacattatcacatatttttgtgacaacttcactaggtattaatggtttacgtatttgaaaaaataataatgattcaacacctaatggtacaccacgaaataatccattaccattctttgaatcctcttttctaatctctgcaagttccttctcaactgcatcttcaacagagagttctttaccatctttaccatcatcttcatctactgctgctttttcatcctttaatacttcacttaaaatatctcgtaattctctaccacctgctgtttccttacgtattgaacatgatgcatatataccatattgtccaggttcaacaactgtatgacatctctgtctcttagatgatcctcctccattaccactactacttctcttacccattactatatatcaagttgtattatcgtaaaaaatgcaattaagaatgtccaatacatatttcaatttgttagcaaagctgaaaattttagttatgggaggctcagcagaattgggtacatcgattatttgcaaacacttgaaagttacatctttccattcaattttaatcgttgatcaaattcataaaactataaaaaaattatgcaattaaaaagatggaaatctaatggtcttaacccaattaaaagaaaaacattagatgaaaaaagagatacttttgatagtgattcatccgatctaagttcattagagaaaaatgatattgaagataaggataaggataaacttatacgtaaaggtgatatatttctgcctatctactgatgtatttattttgtaatttatataagttattaataactgtaatcccataattacaccatacttgcttctatttgtgctttaccatttttacgtgcttgtctctcttcaaatgcttgtctattttccaacactctagcaattatactatctctgccagtagtatctgcttcaatgggtccttcaactgttaacacttgtttataaaatttctttaaatcatcttcaccttttacactgttaacaataatcccattgatatatttactctgtaaaacacataaacttctctctaaattattcataacgtatccactaccatcattatcactttcaataccaacaattatatcaaattcattatcgacatacttctctcttaactctttaagtaataaaatatgtccaggatgaaataaatcccaactaccattaataaatattgctttctcattcattcctttacccttaactaatacttcaccatcattattgaaaacccaagcaccaatactttttgcatcttcaccctttgaatacatttcaaattgttttaatgaatttttttcccatccttccttaagataatgatcattattacctctatttaacattctaccaactaaatcagttgtactaatattaggagttctcttaacaactataaatctacccatatttttaacttccgcataacaatcattaccatctttatcagttgtgatatcatcaccatgaacaacatatttacatccatattcatccattacatgataatcagttacataaggtgcattggggacaaccaatgtacaccatctacaaccttcaactgcaataactctttcatttaatttcataactggtggtcctttattaattaaaatatcttcatcattatgaactccaacaattaactcatccccttccattctagcctgtaacattgcacctgcatgtccatgatgtgcaaagtcaaaacatccatctatccaaatacgcattgtcatcaatctactgctgtggatatatgcaataccaataagggtaaaaacagcgtgtcttatatatacacaacgttatgaatagtaaatagccacagtgtggtggtgataatcgcggtctataaataccggccacttatctcccaactgttatcttacttttatcttactttcttttagtaaagtcaattataatcaatataatatatataatatgtcattagcaataccacgtacaggagataagattccaactttaggttttggttcaggaactaaatggcaatggaaaaagaaaggtaatgaaaatactgcagttacagctgataatttattaaatactgatccagatttagttaattcaactattgaagctttagagacaggtttccgtcatttagataccgctgaaatttatacaactagaccagatattggtttaggtgttaataaatttttacaattacatccagaaattaaacgtaatgatttatttattactgataaatatcatgctatttcaccacatatatcaaatgaattaccaaatggtaaaattagaggtccttatgcttcattaactacaggtttaaaattaatgaatttagattatattgatttattcctgcttcatactgttgatttacctaaaggtttatcattagaagaagcatggaaagaaatgattcaattacaaaaagaaggattagctaaaaatattggtgtttcaaattttgatattccacatttagagacagttattaatgttgataaagattatccacctcaagttttacaattagaatttcatccatatttacagaatcaatcaccaaatattttcaaattttgtaaagaaaataatattttaattgaaggttatggtccattaatgccaattacaaaggcaaaggatgaaggtcctttaattccattattaaataagttagctgataaatataatgttacaacatcaaaaattttacttaaatggtcactatctcatggtgttgttgcaattactacaagttctaaaaaggaaagattaattgattctttacaagtttatgatttccaaattgatgaagaagatttaaaggaaatttctaaagttggtaatactcatttctatagagcttttgcaatcaaaactttgccacaatgggatgaacaattaaaaactgaaagaaatgttgacaataaatagaataaacttaatcactagaataaatagaatatttttttttatgtaataataaattatataataaattatactattataaagcatttttacgtgtaagatattcaaatctactaaatgtatatccaataaatggtaaatcagtttttgcattatcactatttttcatatttaatctatcattttcagcttgaattaatgcaggtgaatcaggtatattctctaattcatcagttgggaaaaatctcgtatcagtaattgaccttaattttggtataaatggtgcttcaacatttctaatttcatcccaattaacacctctaaaaaatggatgtctcttaatatcatctgcaccattatgtctacctaatctaatttctgcatttgttaataatcttaaaattaaatcttctgcttcagcacttaaatgaatatcttcagggaatactaaagtttgtttccaattaagaatttttttataagtttcagttggagtttcactacaaaatggtggccaaccaattaaacattcaaacataattgcacctaatgaccaccaatcacattcttgtccataaccttgattaatgaaaatttcaggtgcaatataatcaggtgtaccaactgttgaatatgccattaatctacgagattttctccatgtttgcatttgttgtctatttgacatcgttaaattaattggatcaaccaatacactatttcttgatttatttggtggtataattgtattattattattattattgttattattattctccttttgtaataattttttataataatttgaatcatgagttttatgaaatcctgtacttaaaccaaaatcacttaattttatatgtcctctcatatcaattaaaatattatcaggtttaatatctctatgaataaaacctaatttatgaactgcttcaattgcaagtacacattctgcaatataaaatcttgtaacatcttcagtaaatatttgccatttaattaacattgtcattaaatcaccacctggtaaaaattccataattaaataaagataaagagaatcttgaaatgaataatataatgaaacgacccaaggagaatttgcatcagctaaaacatccctttcagctttaacatgagctaattgatcttttttatacatttcactttttaataaagttttcattgcataaattttaccactatctttcttttgaactaatctaacttcaccaaatgcacctttaccaattactttaacagtattaaaatcttctaatgataatcttgtacgacgtaatcttaaataatgtgattcatttttaccaaataattgagtttctctatttttacgttctaaacttatatcattattatttaaatcttgttcaaatttaatcctacgttgattacgttcaattgcatgttcaattgaagttttataataatgctctaaagttaatttaacagctgatgatctatcttgagtttccttggagaaccaatctggatgacgttcaaaatatacataattattaggagtattgttattattattatttaatgattgatcattattatttggattaagatttgatcttaatggtatgttattattcatattattcatattattcatattattgttattaaatttattattatcaaatgaagaatttgatgaaattgttgctaaattattaaaattattatttgatctaatacttcttgaaggactatttggaggttgtggttgagagaacattccatcataattacttggggatgaactaaaatttaaattattatttgatctatttgataagtttgtaaatgagttgttgttattattatatggagagttaatcattggattgttaaatgtattattattgttaatttgattattattgttgatttgattattattataagaaaattgattaattggttgactatattgataattatccattgttgaatctgattgatccatcatagtttgatccattgtagtatcagggtcattcattgtataataaattgcataccaaaagaaacatcattaaggtaatttcatgcataaaatggtttctaaagggtggtattataagctttacagtgaagatcgcgtttcattatagtattagattaggtaatcatatttttactctatattatactacatggatatcatttcaatagtaagtgaacttatagttatatattaatattaaataagtaataatagtataatataaaaaggagttgtaaataatttgtaataacatacatacaacacaattagaattgtaaagcagcacccttttgttttttatcaccacctaattcgaaatgcttacatctctttaatggtaattgaagcttagttttacaagcaacacattctaatcttaaaacaactttctttgtagtctttgcctttttatggaaaactggctttgtttgaccaccataaccagattgttttctatcatatcttctcttaccttgagtatataatgaagctttacctgctttatattgagtaactctatgttgagtatgttttctacattgtttacccttacagtaggtctttctagtctttggaacgttaaccattgtatttagcttgcttaacgggaggtaatatcaaagattaaaatgaaaaaataagtgagtaaactaattaacctaacctaataatatttcaatatgaaaaaaattggaaaatttactaatattcactattactttactattactattactattactattactatattacttaagcaattattctcatttccactcttagaggaattctttccgcgcctggtgtgagggggttgaaagcggattttgtaaagttagtgagagagaaagattttggggtttttttcacatagggagggtttcacgtgagggtagccctgggatgtgtcacgtgtgctggtggctcattattttattagtttataatttacagtagctatttacaagttacaattagttggtattggaatatcgttattaaatttgttatctatcgttaaaaaaatatcttttataaaaaaagaaagttgtagttcatttctatcatcatctctatcatcatctctatcatcatctctatataaatcgctttattttacccttaaattcatttatttcattaggaatttcaacatatgtattatcaacatcattaaattcataatttaaaacttttgaataatattcaagttttaaatattcatcatcactttttcgtatcatttcaatctttggtattaaattttggaaaatctttaaaattccataaatattatcattaattaatctatattcttcaattactttcttgaaaaattcacttttaaataatttaaaatattctttggttggtaaaaaatcaattatcattgataaataattattaattgaataattaatttccatcttctttaaattttccttataaataattctcttatatccttgattaagtattaattttaaaattatattgttgttatcattaatttcatttacctttaaataattgattaaattaattattatttgatcatttaataaaattgaatctaaatttaaaatttctctaattgtcttgaaaattaaattcttattatttgaattaataattaattgtaaataatttgataaataatttgataaataaattgaataataatcactttcttctttaccattaccatcagtatttaatataattggtaagaattgtgaattgaaatctttcctaattataataaaatcccaaattttcattgccattgttaaattatttgaattaataaatgaatttgataataaaataagtgatttaatattcaaatttggtaaccaatcaaatttagaaaatttttcaatcattttaattgataagtttggattctttaaacttaatgattgaatataaattgataaatattgattaattaaatattgtgtttcatcattcaatttatttggtaaattatttataattgtatctaacattaatgaacttttatcaaattcattacataaattatatgattcaataattgattgataaattaaatcaatgttgttgttattattattattatttttattagccttagtacctgaactattactattattacctttgatctcattattatataattcttcaataaatttaatatcattgaataaagttgaaaattttataatttgaattaagaaatttgatttatttgattcattaattttatcctttaacatattataaagttcatttgaattaattaaatttttaattttatagtaatttaaacttttaattaaattaatataaatttcattattaataaatgatgaattaatattatttttttcaaatattaaaaataaatcaaatgaaattttgaaaaattcataaccaattttataattttttgaattataagattcaattgatgaattaactaattcatttataattaattcataaatttcattatttggttttaaattatttgttaacatatctgagtaaacattaagtaaatgagttaatttaatttctaatgattcatcaatatttcttaaaactattgattttaaaactttatgataaatttctaaatttggtataatttgattatttctcattctattgaaaacaggtaaaatttcattatatttattaagatttaagaaattattaataatgtaaagttgagttgtaactggatcttccttatgaaggaaatgttcaagtatattatcaatattgttatcactattaacaggattggtattaatatgaacagttgcattgtcaatatgttcttttacatctttgatttcttcctttaaatcttccttaacttccttactttcctttaattcttcaattttatgttcagttgaaaaagatcttttttgattatttttcagtaaagtaaaagctaaagaatttgatattgaaacttgtttaatattatttgaattagctcttctaatattaagaattgtattattattattaattgaatcaatagatatattcagatgagaatttttattattgaaagtagctttaacactattattattattagtagtgatatgtaaattatttaaatcatttaataaattattaatattttgttttaaatttaaatttttattattaaaagaattttcattattattaatattactattatcacaaaaaccataatttttagcaactgataaagcaggagcaacatatttgaaaatacttttcttattatttgtatgagaattattattatttgatttaaaaccaatttcatccaatctaactaaatcctttggaggtatataagatggattaaagaacttatgagtagacccattagttgaggaacagttccttgaaaaggagaatgagcccttttgagttcttaaacgcatagttgtccaaataaaagaagaaagagaagaaagaaagttgttaaagacagtaaataaaggataaaaatttgcctttcaataatgatccctctccataaaatttaaaatttaaaacttcgctgagctttgaatttataatactgtctttctattggttgattatagaaggatgtagtatttaatacattatacactataatagtatactagaatgaccatataatgaatatactacacaaatacattactacaatgattatatactataataaaccaataatatcaatgataaaccaatagtaatataccaaacaataacaaaacaataacaataagtaaaaattataggaccgcatggcatgtttcttatctaatttattatctattaatatccgtatatatattatcaaagaaggttttcattatcatgattatatatgatcattgattattgattattatcatttattctttcattctcttttcttttaacatctgctcacatgcagttggataactactctttcttagactctatagatttactctcatttaatactgataataattgtactttagataacaatgatattaatgatgttaatgatgttaatatacacttattagataatattaatcaaaggcccaatttccatttaaatgaactatctcttaattctccaattgctttatctttgaatcatttaaatgatactaataatgatatcaaatctgatagcattgataacattgaaaaatcatcatctcctttttcttcttcggcttcctccgtttattcatcatcatcaactgctacaactaatacaaataattcaaataatacaactgataatacccctaaatatgttaatacaaaagatataaataacttatctcacgcttatatctcaaattatttaaataattcaaataatttaagtaatttaaatactattaccactactgacactactacttcaaatacctatacaaagataaaatctccaactttgaaatctcaatcaaaaaatgattataattttaatcatgatcatgattataactatggatatgactataataatactgctttaaaaaattcaatgcaaaatattaacccacttacatataatttagatgttgaattacaaaatgatttaatacttactgaaaatgatgaaattgaagcagatgatgataatgaagaaattgatgatattgataatcttaatgatcttacaaatttgaataatgatttaaaattaaatctttcacatcaaaagaaggataatcccgttattaagaaaaataactctaaatttacaatgaatactgaatcatcatcatcagcaacaacaacgaccacatcttcaactcctatgaatacaaatgacgaagaaataaattcattttatgattcaaataatgatgaatcaattgaagaacataaaaattcttttataatattacaaggtaataaaaagataagtgattcaagattatcgcttgctcaattatcaattgttttaaatttaaagggtaatgatgaagaaactgctaaaagggagaaaaatatacttgaaatattgaaaaatgatttaaatttcccgattggtgaaaaaacttggattagagatactccattaattgaaagagagaaaattataaataaattaactgatttagttgaattaaaatttaattatggttataataagaaaatactttcaattattgttcgtagagcaagttattatatgatgcaaggtagattaagaagagagagaagattaaaacgtaaaaaggctaaaattaataaaaataatacattacattaaaaaaacactctgtaaaactatatatgtaacttaaacttaaacttaaacttaaacttaaactaacataaagtaaaataacttctgcgccgccttttccaatatttttctcagtcttttccattctattccatttatcggacttatttctccctattatcaaatttcctttctttattccaataatcattacccattcattcgataaaatatgtcggattcacaatcaaataatgatacatcagacaatgacccgttaaatatttcagaattatccaatactttcgatcaattattatcagatataactgaacaatcaaatttattatcaaatgatgttttaaattatgttaataatcgtaaattgataatggatagtaatttatcgaaaattaatgaaaatttatcaaattgtgaaaaattaattaattattctgataaattattagaaaattatgatttattacaacaattacaaattttttcaaaagattttaatacaaggttacaaattgttcatcaaaatttaaaaaaataatactataatctttactaatatcgtttaatttcattctttaatctcatctcttcagctttataattctttaattcttctaatttcttcttaaatcgtatattggcaataacaacataaataactccacgtaatttattaataggttttaatctcttttcatcaccaatatcaactctaatacctccattctttaacattctcttacaaattgaaatactttcatctcgattcttaatcattaatttataatattcaatcataaatctcaaatcccttaatttattaccatattcctttaattttaacattgctaaacctttttgactttgtaaaatatttaatctaccctctgccctacttggtgattcaggtgttggtggtgtccaattatttatatttctttcaagtaatctattacgattctcaagtatctcaatcttaccctttaatctccttatttcatcatcattattagaattactaatactttccttcaattccttaattttaccaattaattcatccttcataaaattatattcctcaacaattgaattatattgtttcttttgttcctcaatcttactttcatattcttcaatcttcatgtcatattctttaatcttaaatgaattaactaattccttcttttcgactttatgactgatttctgtagtcttatctaatataccatccgtttcctcattaattcttctattaacagttcttaaatcgttcatttcactattaattttctcaataatattatttaacctttcaatctctaatttcctctcctttaatcctaatcttaaaactctcttatcatcttcaagtttggtaatattattctttatttcatcgttatattccttatatttactaaatttctctatttcaactttcaacttagaattttcatcttccagttgaatttttgaatcctctaattttcttttatctatatttaattcattaactttattacttaattctgtaattttagaattaatagattctgtatctattataggaacctcagattcaaccaatcttttcaactgtctcttatatctctcaatttcatcatttttggaactaatttcatattctaataaatttaattgttccttataattactaattacactcatcttttcacctttaattttcttatattcaatggacagtttagctaaatcatcgcttaactgatcagtaacatcagatttaagaagtttctcatatgtctctttcaaatcatcatattctctccttaaagctatataatcattaattgagttttcacttttagaattcgactcttcaaatttttcatataatattgcatattgttcttcaattttatctgcaatgcttttagtttgttcatgagcttccctctctttctcaagttcctccttcaattcataaatttgttgataaatttcatcatgatcatcattttccacatcatcctcaacattatcctcatctccatcatcttcgtattgtgcttctaacatttcaatttttttctctagctctttaatagtttgttctgcctttttcaaattttggtacaaatcctttctatctagatttagatttttattatttatttccaatgtattaactgtatctttatattcctccaattgctccataatttcacgattattgttactaacatcattaccattactcaccacattctcttgcaatgattcaatagtctttaattgtttttgtatttgaacacttaattttttaatttcatctcgtaaatccaattcaagatcttttaattcattattgtctttagataatttattaatagagtttgatgagtcctctagtttattaatcaagttatctcgttcatctttccatgaatgaaatttattcgttaatttttgatctttatcattattttcttgttcaagttctcttacttgtaattttaaatctttaatttcattatttaaatcttcaataatagatgaatttggttccatatgcgatactttttcattactgttttccatttcatctatttcttgttttagttgttcaattttatcatctttcttcattatttcatcctcgagttcatcaatcttattatgtaattgatcattttcattttcaactctatatttttcatcggatagaaattcaattttttcttcaagtccttgagaattaagattattatgactaatattcgttagttcatcctctaattctttaattttactttcatattcaaattttaaatgaattaatttttctttctcatcaagagtattttgatatttatcacgcaataaattcatttcacgtttattttcatttataatattttctaattcataaactttatcattattattagttacaactggattttgctttaaatgtaatatttgtttctttaattcaatattttcattaattaatttagctgaatcagtgggtattcctttaaattcctgtcgaagtgttactacttcaactttcaagtttgtattttccacttctaattttttaagtttttccaattgttccttaaccatattagttccatcttcatttataatattattattattgatttgattttgattaaaatttggtaatatatttctaccattatgaacaccatctctaccaaataaccttgcagtttcctcattccttccattaccattttcttcacgtactgaagatgcagctgatgaatttaatgctacaacatcatcatcatcataattttcttctgaaactttcttcattctatgtaaatttttagtattattaatattattatcataattagtattacaatctcttccagcactacttcggaatagatctcctctattcattgtccatgttggcattctctcagttaattccgagaaaatatctgatcctatcctaccagcggattgtttacccattggtgtaaattctcccacaggtgtacctttaccaccatctttttttccagtatcaggtgtaaagctcattattatctgtggtgtcttactttactttacttaagtcccctttccactgttatccaatgaaaactgcaacaaaacaatcaggtaaaacccataaaaaaacaccaagatgaaacatgtaaacatgcaaaataggggaattttattttcttcgcgtagtatttacataataaaaatctacacactatctacagctttaacgaaggcttctaatgataattttgcagagccgttaactatactttctcttgccatttcaacaccttctttccaattacttgccttaccacatactacagctaatgcagctgaattcattaatatataatctactaatggattaacacccggttgtaataattctttatctgttgtatttaatatctttgttaatatttcagcattttcacttggtgtacctgatttaactaattctaatgaatgttcaggtaatccaaaatctgacggtgataattcaaatgtttcaattgcatcatctggtgtatccttacgatgaagccaaattttagatttaccaattggtgaaatttcatctaatccaatctcaccccaaacaaccattgtatttgcacttttattatttgcattatcaattttaattgctgctttacaataaatttcacctaattcttcagtataaacacctaaaattcttgagcttatattaattggatttaataaaggtcctaaaatattgaaaattgttggtatacctaaatttttccttacattaacaactttactcataccatgatggaaagctggtgcaaataagaaacataattttgaatctttaattatagttggagcagttttagaattaactttcattaattgaacacctaatttgttcattaaatcacctgaacctgatgaacttgttgatgctttacctccatgtttacaaatatttatacccatacctgaacttataattgcagcagacgttgaaacattaaaagtattttgtgaatcaccaccagttccaacaatatcaacatatccatcattatctaatgatgaatgatctattttttcagaatatttgagtattgtctcaactgcagttgcaatgaaatctggattaaaatcaagtttatgaattcttaatgacgttaaaaatgatgaaatttcaatatcatttgcattatcagtgaatattaaatctaatgcttcagagaattcaactggtgttagagttggagggtttattattaatttcttcaaatatggagttaatggttttgacattgttgatattaagaaaagaatgtctatactctagaatgtccaactgattattaacttaaagatcgaacataaagttaagactcatacagttactaatataatctcccccacataaacagactcatcgacgctgcaatgattataattcatttcctaattaaaattaaaatttacgtgtttccatgttttcaattaagatttattcgctgttgatgtttgtttagacctgttgatctctgatttaataacagatatatacatatacgtgttgacaagaacaaaatgaatgagagttatatacctgaaccaattggtattgccaacttacctaatcaaagatataaacttgtattaaaggaaggttcaactttcactttaatggttgcaggtgaatcaggattaggtaaaacaacttttattaatacattatttcaaacaaatttaaaaccaactaaagattcacgtaatcgttttaattcaccaattaagaaaactgttgaaatcgaaataattaaggcagaattagaggaaaaaaattttaaattaaatttaaatattattgatacaccaggatttggtgataatattaataacaatttatcatggaattcgattattgaatttttagatgatcaacatttatcatttatgaaacaagagagtcagccagatcgttctaaaattaaagatttaagagttcatgcatgtttatattttattaaaccaacaggacatacattaaaacctttagatataattacaatgaaaaaattaagttcaagagttaatttaattccagttattggtaaagcagatactttaacaccaaatgaaatgttagaatttaagaaaagaattagagaaattattgaaattcaagaaattaaaatttattcaccaccaattgaaattgatgatcaagcagcaactgaacatgcaaaacaattaattgaatcaatgccattttcaattattggatctgagaataaatatgaagttaataatgttcaagtttatggtagaaaatttccatggggtatagttgaagttgaaaatgatcaacattgtgattttagaaaattaagaagtttattattaagaactaatatgttagatttaattttatcaacaaatgaaattcattatgaaacatttagaaataaaatgatggatagtgaagatattagtgaagttaataatgttgataaggataaattaagtgataaaattgttaataatcctgaatttattgaagcagagaagagattaaagagatattttgcagaacaattaagaaatgaagatcaaaggtttaaacaatggaaacaaaatattcatactgaaaagaatagacttaatcatgatttagctcaattacaatcacaaatgaagaaattagaggaagaagttagattattacaagaaactaagaaaacttcaatggtatagtctatatttgttttttctttataataatcataataacaataataatatatctacaatttcattttctttcattcatttttatagtttaaagtttatattcccccatttataagaatctacaataccatttacatcaaagaaaaaaagaaagaaataaatgatatggatgatgaaaatattaacactgtttgaatgttaatacattttctaattgatttctttctcttattcctagatttttttgttcatttcatttccaatttaaagtaaagaaattaaattataaaatataatataatatagtaattttgtataatagatgtaatattaatattaattaaaaatgaattaattaacttaatcttgagctctctttgcagctttctttgcagcttttctatcagtaccaaagattttctttgatctatttttcttttgctttctttgttgtcttgcagctttttcaactttagtagctaaaccatatctaactaatctgtaagctggttcaaatttctttgcatcagcaacagaattgtaaactaaaccgaaaccggttgatttaccaccaccatattgagttctgaaaccgaaaacagagacttgatctttttcaactttatataaagcagataattgttctcttaattcatcctttgaaacatttgctctatttgggtgaataacatcaataacaaattgtcttcttgctaataaagcatttggtaaaacctttctggttctaatagtgattgcgtcagacattctttattagtggatgatttctggaatggaatattagaaaagggtattaaattaaagtaaataaatttaaaaataatggtataatactaacaaaggtatagcaataatattaaaattaagagtgaaaaattgtattgaaattaagagtgaaaaattgtattgaaattaagagtgaaaaattgtattgaaattgaaattgaatgggtaatactaacccactactaatagaataactgggtaatttccaaattttccaccaccgtctcactattttttttctcccaccatattcctcattccattccatttcaaaaaaaaaaaattttgccaattatttttccagacacactcgcaccgcactttggaaattaaatttcaggaaacacagtcacatcaacaatttttcatttgctgcgccactctatattttatctaatagctgcgccgtatttgttttatcaacggattacgtaacactctcggtattttaagaagtttcggaaaattaactaattttattacgtaatatttatttttattaatagtgtacatacactaagggatactaatactaaattaagcccttattctaagtataaaattgacaataactgcaataagtaaaaagaaacaaagcattgtaggaccaaatctatcatcataaggacctgatcctcttcttctaattgcatttgctctccaatgataagtaattaatgcataaatcattgtacccattgctaatattgtaaataatgatgcagaaattctaccaactttatcaccaaaatttaataaaccaattgctaatgatccaagaataactgtaaaatttaaccatgaaagaaatgttctttcatttgcaaagaaaacttttggttcaactctagttggtaatgcaattcttttacctggaactgtttgtaataatggtgctgatgacatttgttctctgattattgttatgtttattagttatattatattatcctatctaataagatgttattatactagatataaatacagttctttaaatcattaatttaaaatcttcgatgtacttaatctttaattaaattttctattgtactgcataataatattaaaatttctgttataataagtacacgtgcctactccgaagttacgtaagctggactttttaatctcttccaaatgcttattttttgggtcgatcgaccgtaacatgaatatatcagattgaagagagtctacaataagatccgattaactatataacgcaaggttctttgagagaaataactataaacgatgactgtaactccagtaatcaaaactaaagaaattaacccatctaaactagtatgtattattatcaaagtatccattgaagaacgagtactaacatttccgtatatatttttagcccataaatgatactgaattaactcaattcataaatagtcaaatatccacaaacaacaccatttcaattgatcaattatgtgaagaaattcttaaattacttaaaggtaaatcttcgaaatttaaatatatcatcaactcaaatatattttcaattattgattattctgataataataaaattaattcatcatttaatgctttatgggataacgaaaatgatggtttatttaatattcaattccctttaaatgacaaccaaatattacttacaataattttcatatctatataagtacacagtattatatactatactatactatactttattactttttaattggtgaataatgaaatttatggaaaatactttgttctttatcaatattttcattcattgatttcttacataattcttcacattcacccataatatatgaaattcttgatttatcaaattttttacattctaataaaattcttaataaatcacttggtaaatcaaatatttcacttaatgcaattgtccatctctcaataatttcatcctctgttttacttgatataatttcaattataatatcaaatataatcattttattttctaatataccttcttcatcatgtttacctaatatatccattattaaatgtccatccctttctaaactttcaacaattttattttcaaatttccttttataatttaaaacttttaaataatttaataaaaaatcatctgttataaaatcaaataatgaaataaataattcaggatatgaaaaatcaataaatggcataatatattcttcatcgattatacgtaatatactttcaataattgtacttgatttataccatgacttattgaaaatttcaattataatcattttgtaatcttcaattgataaattagataatttttgtaaacaatatgtacctagttcaattgaatgattagttgcaatatgttttaattcaattaatttatgtttatgaatatcatttaatccctctgttatattatcaaaatctctctctaatgcatctgttaatgtaagacaatcatttgataaatttgtaatatatcttggtaaatatccaatattcttaatttcttcatctttattaatccatttaatagtcattttatctaaacttctaacccatttctcttggaaacttctcattatatcattggcaaaaaatccaaaatattgaactaatattgttgcatcacctaatgttctaatactcttagtatttgatgataaaattaacataatatcttgtgctgattgaaatgataatctatcttctttacgatcacttggttcttcattaagtgattcaaatttatcaattgatttatttaatgcagtttcaatccatttattggttgatgaaatattttcttgtaatgatttatttaataattgtttcttcttatcttctgatattagtctaatattctttaattcttcattcttaaatttaaataattttttcaattgggttctattttcataatctaaatctaaaatctcagctagtttgatattattataattatcattatcaagtatattattaataaagtttctgattgatgattgatgccattctaagatttttgggaaaaaattccattcaactgggaaacatctatcaattgcaattttaaaatcagaaattgtttgataataaaaacttccttcactgcccagaaagatggaaataccattattttctaaagtatctaaaattttatcttcaattgtcttttgaaataaatcttcaaatattgtcttataacctctttcacgacttcttttaactttagttaatctattatcactgatgttatctatattatcatcattaatatcttcatgattaatttttttcttctctaaaagatgattccataatctaactttcaagtcttctctttcttcatattgaataattttaataactttaattaaataaccaaaattttcacattcaacgaaatctaatattgaatcaactataatacttagtaattcattaaactttaaaacacattcattcaattgatttgcaagtttatcaaccaatactttagtttcattaatttttgatttatttgacattatttgcatttgatcttgtaaatctcttagtttattcaattcaaaatgtgcaattaataattcatcacctgttgaatattgtaattcacctctttcatcctttgaaatttcattatttaaagtttgaagtataatcttttgttttgtatcaaatgttgaaatattattataaacttcttcaattaatttaatatttttcataactaatgcagctttatcaaatactttaaaatcatttgagctattgtttaataaattatcgttacgtaaatcatctaatttctcaactgtatactttaattcttgtagattcttattagcattgtgcatatcggatatcattaaatggatttgttgtaaatgtcgatcttgttcaatattaatttgcgaatcaattaaatgtttctccttcgttatattagaaattatgttttcaatgttatttaaatcatcctcattcttcaatatattactcaccttgaccagtaactcattggatatcccagaactcatcttgtacactgaaaagaaaccagatcctggaataatgctcagcgcagactctccctctgtatagtaaacaatcaaaatttcaaattctataagattaaaaaggtttcattacgtaattatctatactaaggttctatacaatgccattaaattaatattagttaaaagagtgtctatatcatctaaaggaattgacctttgttgatgacaaatgcttcaagagtagcaattgcagcatagagtctattttctgcttctgggaaaacaacagaatgatcggagtagaaaacatcatcacttacttcttccttatgtcttggtaaacaatgcataaatttataatcatcctttgctaatgaagttaattcattattaatttggaaacctgaaaattgttttaatttttccttagtttgactttcttcacccattgaaacaaatgtatcagtaactaaaatatttgcatcagttgcagctatctttggatcatgtgttaattctaatgttgcacctgtttcatttgttatttttcttgcttcatctattataaattgttccatttcaataccatttggtgttgctatagaaacatttataccaaatttcattgctgcaatagctaaatcatttataacattatttgaatcaccaatccatgctaatttaagaccctttaattcattgaaattttctgtgattgtaagtaaatcacaaattgcttgtaatggatgatatctatcacataatgaattaataattggtactgatgaatgttcacataattgttgaatatcagcatgtgaattaactcttgcaaatatacatgatgtcattgatgaaataactttagttgtatcataaaatgattcattaacaccaagttgaatatcttccttacctaaaaacattggttgtgcgccaaaatatgctgctgcaccttcacttgaaattcttgttcttgttgatcttttagtaaataataatgctgcaagttcaccttgaagtggtaaagttgctggcttttgttttgatttaataagttttttatgatacgctgctctgttaactagtgatttaaattctggtgttgttaaatcggaaatagaaattaagtgtctaatagtgttagatgctgtcattgtacttgtagtaaatgttcttgaaattaactttggaaaaagcataataagataataaaaatgtgtgttaatcaataaagagaaaatttaaatctcaaaaacagggaagaaactaaggtttaaatagataaatttcaaaagaaaaggagtgaaaaaaactgtaggtattatgactattaattaaattgaaaattaaaaaattccagactatcaaatttactgcaaaatgaactgaaagttaagcgctttattgtgtgggttgcctttttaggtaattccacaagcgcgcttaattttaattggcagattcaaatgacgttaaacggctattttgattgtattatcagttatgtttactgtttttcaagaactgagtcattgtatagacatgttgagctttcttttccgataataaattatgttcagattgtaattgttttagtttttccctttgttttataattaaattatcaaacgacgtcatcttgttcttcattacttcaaattgttcctcaaatgatattggtgaatgtttaaaatccatacctttctcttcctctttcctatcattactgttcggaagttttggtagaatacctttgatatatggttttggtatatcttcatcttcttcatcttcattcaaactagtttcctttaacgcttgttcaatatgtcttcttctttcaagttcactatctgtactagaaggtatattatcattactcttggattcaaacttatccaccgcacttaaatcttcttcttcaatatcagaaccctctattattatgccttcatctattttctcattattcactacatcttctgtactatacattttcaaatactctttgatatttccgctttttgtttcatcatcatcatcgacactgctatctttattcagtagattggatatactttgatgttttcttttaaatgttactttaggtttaatcagtatatcttccactatttcatcatcctctagaggtacactaactgattctttatttgaactttcagtctttggttttctggtcttgaatttattaagcttgggtattggagtaatcacatcaatgtcttcatcttcatcgttcaatagaaaggataatttggacatggtattactgtatgatataagtttacaacacctaaacaacagcaatgtcaaagttgaacatccattattgttagtagcgctttactaaatttctttcttaagtaaagtagaaagaggtttattttcacgggtaatttatttactattttgtgcatacctaactgaatatcaaataggatattagagtagtgttataatgggtacatgtggttgcttataatgtcagaatatcaaccaataaaggtcattgccaacagttaatagaacgtaaaatctcctctgcatactaactcactaaacaggctgtgcactaacaaattttttaatttttttcaacatgaaatctgcaaaacatttttttgaattcattgatttctattttcctttcttttgcaattttacctgcaatatagatagtaaaccaattaaacaacactaatttttcaaatgagtgatacatttgctgatgatattccagcatctgccaaaaaaatgcatcattttatggtttcaacaggtaaatcttcatatacccaaaatgaattaattgaatcattaaaattatcaaatgttgctgaattaatggaaaatgcacaaattttacttaataaagggttgttgaagattttagaggcagcatcaactacagatccaaatgaaaagcaaattttatttgcttcaatatctgaacaagaagctaaaaaagttaatgatatgacagctgatgaagcaattgtttattctcatgtcgaagcagctggtagagaaggtatttggactaaaactattaaagcaaaaactaatttacatcagcatattgttttaagatgtcttaaatctttagaaactcagtcttatattaaatctgttaaatctgttaaacatccaactagaaaaatttatatgttatatcatttaacaccttcaattgatgttaccggtggtccatggtttacagattctgaattagatactgattttattgattctttattagttgttatttggaaatttattgcacagaaaacttatccaaaatgttttaaaaagaaaggttttattccaaatggtttaaaacaatatagttatcctgcacaaattataactggtatgggttcattactgccttcattatctgatgttaatgattttatagtttcatcgggtattacaacaattgaattaactttatcagatgttaaatcattatgtgatgtattggaatttgatgaaaaaattgaaaatgttggtggtacatataaggcaacttggcaaagtgtacttgaagctggtggtggtaaaatagaaggtgaagatgtttatgctcctttggataatcaaatatttaatataaatgataattatagagtattggatacttcattaaaggatgaaactgatgaaaataatacaaataatgtatcatcaaattcaatgttatatttagattcatggattaatttataaataagcataacatagctaaaagcataaagtgtataatagtaatatatcaaaaaaaaaaaaaatatagaattaaactaacaaaaatagtaacatatttcaggtatttttaggtttcaaatgaaaagtattgtggtaatcctgacatttcttcaatctcttcataagcaggtggaacaatgaaatttagttgtggtttttctttctgcttcaaaatctgcttttgagtgaaagattcaaacaatgaattacccttagaactgtttttgggtgaaacattttcttcgtcttgaaatacctttttaatcattcttgaatccaaatatgtaggtggtggcattttaccaactagactttcatcttttaaaatttctacttctgcatcaagtgttaaatcaactttatccttcttattaggaccttcttgtaacaatttagaagttttcctaatcatatcattatcttgtttttctgctcttgaattatacatcattttatcaacactttgagatcttgatctcatactataggtacttattagatcagattcatcagtgattacattttcatcaatacttaattcctcaactcttatagcaattttaatttgatgagttactttaaaatgacaaattttattctctactgaactcgtagttggaattattttaacattaattttattactttcctttttatcttgaatatcatatcttttatgtaattttggtatctgataatcaaattcccaattttctgtttgattttcaaatgtttcaatatctattgtgtctaataatatacgttcagtatgtgataaacgattatggaaatgcttttgatcattttctgatatgaaaggtatgatattatattcagttatttgatctaaaaatattttaatagatttcagtttatattttgatggatttataggtaatattttgacataaacttttaaatattcaccgattgttaattgtctatttgaaacgaccattttatagtataataaatttctccaattacctagagagagagcatcggaaacagttgttgaaatacttccaaattctgtatcacactgaactatctgtattggtaatttttctatatattgatcttgtgttaatagtgatgatttatatggtgtaactgtaactgtaattgaataatttgaggatccaaaaatatttgacattgattccggtataaggttaggtattaagaattggaaagggtaagtaaatgaacctttagcaaaataatcagattctaaaactttatcattctttttatattgccaagaacgtgattgtgaaaatattgaagagaaaatttctttaacatttggggaattaggtaaaggttgtgaatcaattgggaataactttattgcaagtgtaccatttaattcaagtttgattttagatagtcgtattggcttcctaacataaatacataaataaccacgtaatggagttacctttttagttgattcatcagatctaaggtataaaactttatcaagcattttaagtgataaagtgaacttactatttttcaataatataaattcactttcatcagggatatcgttaaattcaaatggtgataagactgtatataaggaattttctgaatttaaagagtttgaagtagctgttgaagtaggagttatgttttgttgtgcattttgtagtgagatgttcgatagcgatgatattagatgattactgtatttaggtgataacattattggaaaatgagatgggcacaaattaacattaaatgttactgataaataatcaacttcttaaaataaaaatgaaaaacatcgatatgaaaaacatcaattacaaaaaaaaaataataaaaaaaacatgctattatgctcatgagacaattaaaatggaatacttctattgagcgcttatcattgcctatttaggaagtataatatgaaaataaaatcatgtgtcttctcggaattttcccacacttttcattatccctcggaattttccatactgtgaaatttgaagaaatcgatgatgatggatttaagcagctttttggaggggggctgttagaatatttgattaaattggtgtgtaattcggaatctggtttacatttggtttcattgaatcgtgtattgtttgatactatttatcaatcaattgtcatcatccatgtcatccttaacttcattaccaggctcgagtggaaaactcttgagaagaatacgtatgtatagacagacaccttcatttttccacatatgatatgatatcataatagaatttaatataatcaaaaactgaatactaactaacaattctctacaaagctccttatttttcccaacagatcgtgcatgtcgtccaactttagatgaaccaaatattgccttaaatttagaaatttgtgatttagttaattcaaaacaagcttcactacctcgtgaagcttgtattgcagttgttaaattaattaattcaagagatcctcaagtttctgaattagcattaactttattagattatttagttaagaattgtggttatccagttcatttacaaatttcaagaaaagaatttttaaatgaattagttaaaagattccctgagagacctccacctgcttattcaagagttcaaagattaattttaggtactttagctgaatgggttcaaactctttgtaaaacttcaagatataaggatgatttaacttatattaaagatatgtatagattattaagaagtaaaggttatgatttcccagctgttaaaaaggaagatgctgcagttcttaatccaagtgataatttaaaatcaattgaagaattacaaagagaagaaaaaattgctcaaagtgctaaattacaagaattaattagaagaggtagacctcaagatttaaaggaagcaaatgatttaatgaaaattatgtcaggttttaaagaagatgaagcattagaggaaacaaaacaaaaagtttatgatgatttagataaattagaaagaaaaattgatattttaaatgatatgttaaataatgcaactaatactggtactcttaatactaatgatgatactttacaagatttaatttcaactgttaaagtttctcaaccaagagttcaaaaaattattcaagaagaagaaggttcaggtgatgttgctaaattattacaattaaatgataaaattaattcaactttaattaaagtcgcaagtcttaaaggtgaagatattagtaaactacagatttcaaataatgctcctcaacaatctatgaatttaattgattttgatgatgatgaacctgtcgcagctacatcatcttcaaatgttccaaatacaaatgatgcaataaatgacttattaggtgatttaggtggattatcattcgataaatcaagtagtaataactctaattctcaattcggttttggtgcaattaatcttttaggtaccccagaacctcatcaacaacaacaacaacatcaatctccaaaaccactttcaaacttagatattttatcaggtttctcaagtccacaacaacaacaaccagtatctgatacttcatccccattcccacttgtctctgcaactcaaaatcaaccatctgttccaactacaacaaatacaattccatcacaattagatccatttggttttgatttttcttcacctgctgtttccactccatcatcatcatcaaattcattaccattttattccgatgataaaataacagttacttatattattaaaaataaacaaccaattttagaaacaacttttgaaatctctaataacacattcaatcaaataactaatttccaattatcaattgcagttactaaaagttttgaactttctcttaaatctccaaatggaagttcattaaatgctaatgttaagaaaggtatcttacaagatgcaactattaaaagcaaaacaggtgaatcctttaacattgttaaattgaaatttaaaataacttactcttctaatggtgtacctgttgaaacttcaggtgttgcttcaattaccttataataactacttttccgtcgttgtataactctttagtataatattttttgtaactctacatttagaaaaaaataataatttacaattataaaactaacttaaaaactttatgtatttataaaattaaaatctgattaattagattccggtttattccctgttaaaccgaacagttcatcgattttactcagatcaccaaaatctgcatcattgatattcatattattatcattaccactattattcgtattattattattgacattattataataagttttattatttgtagctgttgatgatcccggttgtggtgagaacctagttgtaatagatgatgaattcagtctattgaaatgattaatattagtatttgcattattattagaaaatccaccttgtgcttgtacttgaatttgagcttgcatttgtgcttgcatttgagcttgcatcttagcttgcatcttagcttgcattttagcctgtgcttgtgcctgtgcttgagcttgcatttgtgcctgtgcttgcatatgtgccatttgagcctgcatttgattttgattctggttttggtttaaattagaaacattaacatttgaattttgtgattgcatttgagcttgtaaaatatgttgattttcaatttgtctttgacgaataatcattaaatgtttcctttgttgttcagtcaattttggatttttaattaacatattcaattgctctaatgttaatgaattagcatttttcttctcaccttggtgtgaacttggttgatcagatgttgaagtaccttgcatagattgtgcattaggtgaattattaaaatcagtagatccagaattcatagcattttgttgttgttgttgttgttgtttctcatattgaagttgtttagcatgttgtaatttagtaatgtatgaattagccagttgagtgaccttacttttctctaaattggggttttgagtttgaatttgatttacaatagcagaaatttgttggtgagataaactgaatttaggtttattaactttcttaacaccatttgatgatgattgagaagttgaatgtttggaaacagatggtgatggtgaagtacttgatcccattttaacattttgtaaaacttgttcaggtgttggtacatgacttgtaccgtgagagcttgatctaccagtagctgtagcaaattgattttgaggtgatgaattcattgattgtgaataagaattggaagcttgtaatctttgagattggacagcttgagaaattgcagaagaagaatatgatgttgttaaagcaggaggagttggagaagcgtgtgatggagatccatttggatagtttaagttaggatgagatgatgacattgctgataattgttgaagattgccttgaacattaggtgattgttgcttttgaagttgtgccaattgtctttgcttttgtatttgtaacaatttttgaacctgttcttgagtgaattgaggagttccattaggtgtagttgctctttgcatgttagcattaacttgaatttgctcttgtaatttagcattcaaaatattttggcttcttggagatgccaaggcattggataacttagtttcatgtctcttaccatcggttgataattgtctacctggtgtttgtgcacccattcttgaaaacttttgattcagattttgttgtgcataattttcttgtaatgctttatctctatcgtttttcagttttgctaaatcttcaggggttggagtatcattctttctaacatcaggattttgtttacgtggttgaggtgttggtttctgttgtgattcacgtttcttcattaattttctcattgcatcaaaaacggaagcccatcttaatcttttattacctctttgaattgaatccattccaactcccaatggcgaaattcttcttttagttgtggcttgaacctgatgtgcactttctaaccattcttttgcttctaatgagtgaatacctttcatatcactgaattgaaatttatcatttaattgaatatatctttcaaaacattgccatggggttcttctttcaatattagatgtatatgaaatagttggctttgcagaaagatgagcagcaataacatcccagttaaatgaaaactcagaaacatatttaatcaagtatttatcatcttgtggtaaccaaattgtaggaattcgaatatttaattgggaaataggtggtggtttgggaggtttgagaatattaattcttctgtaaggtccaaataaaccattttcagttttatgtaaattcttatcgttggaatcaatctttctgtaaataattttttcaaattctgcctcttcatcaataggaggtaaaacagcggaaacatgtgaatataattctttttcaattaaatgatccttttccttttcattaaatggagaataatatggtaagttgttgataattgccttttcgctaatagtaaaagcattatagtcagagtagacattgaatggtacaaacctttcggtaattttttcttgatattcgggatatgtgaattcaggtagtttatctttcgttacaaccaaattattttccatgaccatatcttcgtcatcaacagattttttcttttcattttcagtttcggcttcagtttgggtttcagttattttatctttctcatcttttccaatttcgtttacattatcggttacttcatcaacgccaccggcatttgttgaaacagattcttcaatatctttatcatccagtgtttgagtttccttaatattcaatattgcagcatctaaatcatcagttatagggttatcattctcacttaaatgcacaattttggctcttttaatgcaacatactttaccataagtccaataatcttgaacagcttgagcaatataaacacattgtgccattttatatcttctttcttctctgaaatctgtagccagccatttaccttccgaaattaaattatcccagtgtgtccttttaccaagttttaaaaatggatcaataagttttctaggttgccttaaagaccagctattttttcttttcaactcttcaatacgagaatataacactgcaaccttaccttcaactaatgaagtttcaaaagcatcagtagtcaaagttttgtgtgcacggagtaacaatttttgtagttgtaatgtttgttgatgataatataattccgttaatgatcttgcttctgcaactttatgaggctttctttcaggcatcagcgtgaccattaattttctaatatcaagacctttatattcaagatcacgatcagaacgttcatcagatcttttttgttttggctcatgagtatatttggaaatcattgataataatgatggtggatcatttggatcaaattgctttttaacatatacgtattcttcatcattatcatttgtattcataaaagaggtttctggctcatttgttggatttgaatttattggtttagcactttcctgaccagaagaatcagtttctgatactggctctttttcattttctttcttttgagatttattttgattttgaagtagttctgaatctttctcgacattttcagcttctttctcatttatatcttgattatcaggtgtttgaactgcgttggaaaatgaatcacttcttggaacagtttgttgtattttaacaatctcttctggtttaggtatggaaacttcagataaatcattactgcaatcgggcaaaacatttttagagacttcctcttttattattgaagctatttcaattgagttaggtgatggggataattttttagcatcgggacttgcagataatatatttgaaacctttgtttctagtaaagatggagattctgatttagattttgcttttggtttgattttttgaaatgatttaggtttactatttgctgttggagcgggactcgagcttatacttgaagatgaatctgtgtttgatttagatattgttttggacccagagactttaggtttaactttcaagttttgaggattgaaaacattttgatttttttcatttatatttttagaatcaggtttaggttgaatgggtattagattatcagatgaagaagatggtttgacagtattctcaattttcctttgcttcttaggtggttccaaagactcgctactggcacgtccagctgaagctgttggtttgggtatgctggaaatttcattattaggtgatgcattattctgttgattgttctgctgttgattttgattattattatgattctgttgttgttgttgctgtggggatatagatttcctaaaaatcttttcttttgagagaaatgatatatcaaatgtatgccctttctctaaatcattcttttcaagaaaagttactaatttatcttcaatatgttgaacgtgatcacctgatataggtacaaatggcagtctagctacacaatagagttcagataatttacgttttctttccttaataatttcttgacattctttctttcgtttttctatcgattctagtcgtatacgatccattgagtaagaattcgacttctgctgcattgtctgttccttagtaggagtatctgtaggtgttgtattggacattttgcaccttataatatattattatttagtaaaattttttgtatttaaagctcagttataaattaatcgactatgtaacctctaaaaaaaaaaggtataaaataagcttataagatgtatatagcacttggactatatctgctgttaataaatgagtatatagacctaatctgagctctagggatatatcaatagaagatcggaagaaaaaggctctgttggtagtaattaaaaaacaacaacttctcttcaaacggcatgaaaatttctactacgctcacaataccattttccactaaatcaacggtttactaatactatactgatttatcactttaaatctttataaattccatccaagtatctacttcttaagaacaactaaacattgccggcgaagacgacggctacgggtatatttcgttactgagtctttatgtgagggatgtttccatctattatcataataaacccatctagatgagggtaatggattccattgactatctaaccatttccattcacttttatcaaactttttagttattgggaaacggtaatcttttaaactatttagttgttgttgcatatcaatagaacaatatggtgctctatcaaagaataacatatgcttagaccagcctaaaccaacccaacgtctttcattttccaatacttgaaattccacaattttagtgttttcatcaatagtacctttaatatctaaattcataattgaaatttcgttttctttgtcaaccattgaatatttttcattagtaagaaaacttgtgatcaatctagtatatttacttctccataaaagtctacgtaatgcaattgaccaagaggaataataagtcgaaaagaaaatacctgttgtaattaaccatacatcaattgaaatacaatttttcattaaatatacgtagaaaggtgtgagtaatatcaaattgattgtcaaaggtgtaagcaaattagaataattgctactaaaatttgaaatgaatgaacatcgtatagtaaaattatccaaagtatctaaaacttcttcaattgtgggtacagattttccattcaaatgatatttttcattaatgtaagaaactttaataaaccaaacgtaacaacaaaagcataaaactaataaagttggtaatattataacaaaataattattccaatgtaagatcatcattgaatataacataataatgacaatatttctataatgagaattctccttactacttgtccaagttataaaagatagaatacgattacatgatactaatagaggatataatgaatgtagggcagatattatatttggtggtgtatcctttagcagttgatgattatgagaatttaatgaaatgtaggatattgatgatgcaggtgtaacaaatgatgcatgaacgtaagattccttcatgatactctatttatcttcacagcattactcaatgcctgaagttcaattaactataactctattaactctattgaactataaagtagttaaccttgtaaaagaaccacatgtacccatcaatgcagtacattccccactgtaaaatcccctctaaattcacccgcaccactttcaccttgattttaattttgccttccctgattacagctgatttacttattattatagtgattgcagtgatcttttattgaaagttactattcatacactggtatcactcacatatatatcacacatgtctgcagaagaaagggtaacagaaaaagaacaaaagactgtagaaaaggcacaagaggaacttgtgaaaagattagaagatgatgatgaatttgaagatttccctgaggatgattgggaagattcagaaactgttggtgctgcacataaggctaatctctgggaagagagctgggaagatcatgatgatctaactgatgatttcactgcaagattacgtagtgaaatagagaaacacacagcagctagtgggaaataattaatgatcattgaatccacacatttttacttcaatctttgtataaaactaccaatattataaaaatcaattaatgtacttgatattcaatctataggcagatataatacatgaagggtatagtatcctagcctatataactatactaacatcacacactgtaagacacgttaagtataaagactggtgtagagatgtagaaattttagatttcctcacattaaattaaatataactatttcaaaggcaaattccaatgctttaaaatcgatgatcctttgattgattaaaaggtttccttctgaaatatatcagataattgaagtaaaacatcaatatggctactttagaagacttagagaataatcaagatttacagatagatgatgaaattctcaattcttcaactaatgacattaaaaatagaacaaaattacttgataatgagatcaagatatttaaatcagaatatttaagattacaacatgataaaagtgtaagtttacaaaaaatcaaagataataaagaaaaaatcaagaataataaacaacttccctatcttgttggaaatgtagtggaattattagatttagatgctgaggaaaatgcaaataatgaaggtgcaaatgttgatttagattctacaagagttggaaagtctgctgttataaaaacttcaaccagacaaactgtctttttaccattgattggtttagttgaaccagaaaaattaaaacccggagatttaattggtgttaataaagattcttacttaatactagatactttacctgcagaatatgattcaagagttaaagcaatggaagttgatgaaaaaccttccgaatcttatgctgatattggtggtttagataaacaggttgaagaattagttgaagctgtcgttttaccaatgcaacaagctgaaaaatttaaaaatttaggtattaaacctccaaagggtgctcttatgtatggaccaccaggtactggtaaaactttattagcaagagcttgtgcagctcaatctaatgcaacatttttaaaattggctgctcctcaattggttcaaatgtttattggtgatggtgcaaaattagttcgtgatgcatttgaactagcaaaggaaaaagcaccaactattattttcattgatgaattagatgcaattggtacaaaaagatttgattctgataaatctggtgatagagaagttcaaagaactatgttggaattattaaatcaattagatggttttggatcagatgatagagttaaagttttagctgcaacaaatagagttgatgttttagatcctgcattattaagatctggtagattagatagaaaaattgaattcccattaccatcagaggaatctcgagctcaaattttacaaattcatgctagaaaaatgactgttgattcaagtgtaaattggaaagaattagcaagatcgactgatgaatttaatggtgcacaacttaaagcagttacagttgaagctggtatgattgctttacgaaatggacaatcggttgttaagcatgaagattttgtagaaggtattggtgaagttcaagcaagaaagtcaaaatcagtttcattctatgcttaagtctataaaattttttactatatactttgtatattataatattataataattaattaatatctaaaatctgaaatcattaattgtacatgtagatgttaccatcataaccagccatagcatataaacttgattcaagtgggtgaacatcaatacaagttataacagaatttgaaatttttaattgacttttaactttagtcgttttccaatcccaaaagaaacatttaccagttgaatctccactgaataatgttttaccatcaggtgtaaatcccatttgaattgcgtatgcagcacaattatgaccagtgaaaactttccttggatttttcttaaatttttcactttgctttgtactatatgttaaaatttgattatccatactttgtccaacaaaatattgtccatttggatgtactttaacaattggtattgccttttgtttatcatcttgaatatatttaattggcatatttatacgagtatcccaaattttaattgatctatcatctgatgttgtaataaattgtttaccatcatttataaaatcaatccatctaactgaattttcaaaatgttcataagtttgtattatctccccagatctttgatctatatgttcaattttgttattatccaatgcaaccaaaaattcattatcattattaggtaagaaaatacacatattaggatttgattttaaatcatgtttgtatttaactttcccactttcagtatcccatattcttacctttttatcaaatgaacatgttataaattcactaccatcagaggaaaatttagaatattttaaagctctattactattatgataatctcttattaattttttaggttttgaaactgaccataatttaaccattccatcagttcctgatgataataagtaatggcctgttttcggtataaattcaactgaggatatagaggaattatgacctttaaatacactcttttgtttcttgggtataaaatattccttttgaccaacaatagttgtagcaaatctaacagcataatcatttgggagttcaaataagtcaaatttagattcattcttaccatgaaagcgtgatgtttctttaaattcagttttattaattttctttgttgttaaagtagcatctttagaacttattatatcatttgtagattccccttcaccttcaatttcatttgatgaagaatcactactagcccatgatcctttatatccatcaatatcttcaggatttcctctattagtttttatctttttccctgatttctctgctattttggatacattttgaagttcgtatgatcttttattacgttgaaattgtaatggatctataatttgtttctcaattttagcagcatttgatttagttgatgatatatatgatgaagataaatttggaagtgtaatcggattcaaatcagttttatttttctctgatataaccaaactcttttcttcatcagattctgagctataccccgttattagactcattggcccaaagaagagagaacttgttaattaagacgtatatattagattaggattatgaaaaattgtgcggcttggattgataaaataaaatttcagtgtcaaatttcaaagttgttgcaaatttttaaacttttcttttctacatcaatatatagagttgaaatactaacaacgaaatggctaaacgtacaaaggaagaggcagaatacgaagattcagatattgatgtttcctcaacagatgatgaagaacttcaagaagaagaatctattgaagaaggagatgagttactcaatgttgattttgatttctataacttaaattcaacagttgattttcatgcaacaaagaatttcttacgacaactatttcaagatgattcagtttttttcccattatcagaattaaccgatttaattcttgaagaaggacatataggtacaacaattaaaactgatggaactgagagtgatccattttcaattttaacagttcttaatatatcaaataatcttaaatccaatgcaattcaagaattaactaaatattatttagagaaaaccaagaagaatgcacaatttaatgttatattaagacaactatttacaccaacatccaaacataaagttggtatgattatttctgaaagattagttaatatgccagttgaaactatgccaccaatgtataatatgttattagaggagatggaaaaatcagagaaaagtgaagaagaatataaatttgattattttttaattccatcaagagttgttaaaatggttgcatcagttgttgataaggaattaaatgatgaagacgaaaataattcacgtaagaagagtaaaaagagtgataacttaccaggtgaatatgattatgttcattatgaggatgaacaaattgaaaagaatgcacttcattatggatattttgattttactaataaaaacattgaagctgatgcaagaagagtgtttaatgattatggtatagaacctaaactcaatctcatgttaataaataagaaagcactttacactgctgttaaacaaatgtcagaagtattcccctatgaatagtgtacccactgtaactgtatattacactgtatataagttcaaaacccccactactaaatttccgaaatctttgaaaattgcgagacatacagctaagaaaaaaaattattttttttctctattactattatgagaaactctcccctttttgtaagctatactagcatgaaaaaaaaaaattattttgatgatttcgattctttacaggatcaacagttattgatttttaattttgattttgattttataaattcgttatttacaataattattcttttggtaatagttgtacttgtaaagaagatcgattattgattgatattactttttgttggtttatttatctcttttctcgatctgaaactttataatgaaacaatcagttactgatatctctccaaagtgtattacaggactagaattcggtgcattatcagatgcagaaattgttgctcaatctgaaacggaagttttcactagaaatttatacaatttagaacatggaagaaaacctgttgaacatggtgctttagatactcatatgggtgtctctgcaaatactgctgaatgtcaaacttgtcgtggtaatttggcaacttgtcatggtcattttggtcatattaaattagctttacctgttttccatgttggttattttaaagctacaattcaagttttacaaacaatttgtaaatcatgttctactgttcttttggaaaactcaatgaaagaaaaattcttaaatgatttaaaacgtcctggaattgataatttaagaagaatgagaatactgaaaaaaatccaagatcaagctaaaaagcaaagaagatgtttaaaatgtggtgctattaatggtgttgttaaaaaagcagcagcaggtggtggtccagcagctcttaaaatcttacatgatacattcagatgggttggtaaaaagggtgctcctgaaaaggaagattgggatgatgattttgatagattattcgatgataatccagaattagaaaaatttgctaaaagatgttttgatgatttaaatcctttaaaagttttaaatttattcaaacaaattataccttcagattgtgaattgttaggtttagatccttcaagaggtggaagacctgaaatgtatatttggagatatttaccaactcctccggtttgtattagaccttctgttattatggcagatgcctctaatgaagatgatttaactgttaaattaactgaaatcgtttggacttcttcaatgattagagctggtattcaaaaaggtatttcaattaattctttaatggaacaatgggattatttacaattagcagttggtgtctatattaattcagatattgcaactcctgcaatgcttcaaaatggtggtactaaagctgcaaagccaattagaggtttctgtcaaagattgaagggtaaacaaggtagattcagaggtaatttatcaggtaagagagtggatttttcaggtagaactgttatttctcctgatccaaatttaagaattgatgaagttgcagttccggaattagttgctaaagttttaacttatcctgaaaaatgtacaagatataataagaaaaaattacaaaaattaattataaacggtcctgaaaaacatccaggtgcaaattatttacaaaaaaatgatgaagaattgaagagaaatttaagatatggtgatcgtcataaactggcaaaatctttaaatattggtgatattgttgaaagacatattgaagatggtgatattgttttattcaatagacaaccttcattacatagattatccattctttcacattttgctaagattagaccttggagaacttttagattaaatgaatgtgtttgtactccttataatgccgattttgatggtgatgaaatgaatttacatgttcctcaaactgaagaagctagagctgaagcaatgaatttaatgggtgttaaaaataatttattaactccaaaatctggtgaaccaattattgctgcaacacaagatttcattactggttcttatttaatttctaaaaaagattcattttttgataaggcaacacttactcaaatgttggcatcaatgtgtgatggtatgattgattttgatttacctccacctgcgattttcaaaccagtttatttatggactggtaaacaaattttctcattacttattaaaccaaacaaaaattcaaaggttgtcattaatcttgatgcaaaatgtaaaacttttgttccacctccaaagggtcaaccaaatgaaatgtctccaaatgatggttttgttattattagaaattctctgattttatcaggtgtcatggataaatcattattaggtgatggtaagaaacattctgttttctatactattttgagagattatggtgcagttgaagcagcaaatgctatgaataaaatggcgaaaatgtgtgcaagatatatgggtaatagaggtttctctattggtattaatgatgttacaccaaaggatgatttaaaacaaaagaaagaacacttagttgaaatcgcttatgctaagtgtgatgaattaattgaattgtataaaactggtaaattagaaactcaaccaggttgtgatgaagaacaaactttagaagcgaaaattggtggtttgctatccaaggtcagagaagaagtcggtgaagtttgtattagagaattagaaaaatcaaatgctccgttaattatggcaacttgtggttctaaaggttctacattgaatgtctctcaaatggtggcggttgtcggtcaacaaattatttcaggtaacagagtccctgatggtttccaagatagatcacttcctcatttcttaaagaattccaaaactccacaatctaaaggtttcgttagaaattctttcttctcaggtttaaatcctccagaattcttattccacgctatttcaggtagagaaggtttagtcgatactgccgttaaaactgctgaaactggttatatgtcacgtagattgatgaaatctttagaagatttcagtgcaagttatgatgatactgttagaaattcaagtaatggtgttgttcaatttatttatggtggtgatggtttagatcctttggatatggaaggtgatggtgtcccagttaactttaatagaacttggacacattcttactttatcactctcaatcataaagaaaaagctcttaaaccatttgatgttagaaaattggttaaatctattttaactcctatgaaggaagcattaattagagttgataatgttggtaatgttgttgctcctgaagattttgataaaattgaatatgtcgatatctatgatgctgaaagagatttctatgattctattttgaactatattgaagaaaaactatcattactttgtaaatacagaatttctcgtggtttacctccttgtaatgatgaaaatgatatggatgttgatagatctgattatgatgaaattaaagaaaagggtgttgatcaagttttaaagattactgaaactatgattaagaattttgttgaattatgttgtaataaatatagaaaggctagagttgaacctggtactgctgttggtgctattggtgcacattctattggtgaacctggtactcaaatgactttgaaaactttccattttgcgggtgttgcgtctatgaatgttaccttgggtgtccctcgtattaaggaaattattaatgcttctaaagttatttctacaccaatcattaacgctattttagtcaatgataaagatgaaagagctgctagagttgttaagggtagagttgaaaagactctattggaagatgttgcaatgtatattgaagatgtttataaggaaaatcaagctttcttacaggttaaaattgatctgaaaactattgataagttacaattagaattgaatatagatcaaattgcaaacgctattgtgctatcaaaacttaaaatttcaagagctgatgtttcaatcactggtaagaataaaattcaagtccttgttaatgatgtagctggcgattataaaccaattggtagatcttcagcatcaaaggaaattgcatcattagctagtagagatccagatgaacgagaaagactagaaagaaatgcattattttttaagatgcaacaattgaaacgtttattaactaaagttgttgttaaaggtttaccagaaatttccagagctgttattaatgttaaagatgataatactaatggtttattaattgaaggttatggtttgaagaatgttatggcaactgatggtgtggttgcaacaaagacaagaactaatcatattttagaaatttatgaagttcttggtattgaggcagcgagatcaagtatcattaatgaaattgattatactatgggctctcatggtatggcggttgatcaccgtcatattcaattattaggtgatgttatgacatttaagggtgaagtcttaggtattactagatttggtttagctaagatgagagattctgttttacaattagcatcatttgaaaagactactgatcatttattcgatgcagcattctacatgaaaactgataaagttgaaggtgtttctgaaagaattattttgggtcaaactatgggtatcggtactggtgcatttaaacttgcagctaaggaatccaataaacctaaaaaggtgggtgcaaaggaaactttgtttgataatttgtgtaaaggtattattcctaagtccatgcaagttgcataaatgaaagaaatattttatagaacttttatgcattcttgtttcttcctttacttttttaaattgctttccccgtgtgtataattatattaaaattgaattttttgttgttaatttgattactgtaaaattcggaattaaattaaattgaattgaattgaattgaattgaattaaaaactatagtataaaaaattggtataaaaaaggtattgattaacctgaaagaagaaataaaatggagaagaaactacaaaaaatgaatagacactttgaattaaaagaaaaaatgagaaaagcacacaaaaaactagttgactaaaggtttagaaacggttaaaattgcaccattttctaaaacttcagtatccaagatttctaaccaatcgtctgattcttttggtttaacccagaaaattccatcatcatttttaagcagaatggatttaccgttaattgttgttaactcaatggaatgacttgatgagtcaatatcaaaggatttagtttcagcgatatgtgattcaacaaaattgaaaatgtttctttggattaacatatcttcttcatcttctgatcttgcattctcaatatcctctgggaattgccatggttttttgttaagactttgaattgcttcattattaggagcaaaaataatcaattgtttctttgatgcttcttcactttcagcctttacttcagtaaatttttgataaagatccggaaattcacgtaagtatttaaagaaaagaactaaatcttctctttgaacaagagctgtagcaatatcaccgttatttgggtataaaatagaagcatctacatttgaatctgcactttcaatggaatcaggaataacaaatttgtcctttgcttcaataactggatcaaacgatttttccttgaaagtatttaaaattggcgatactgatttcaaatctaatttttgtttcattctatgacaaccttctttattttcttttaatttaacattaatactgttgtcatctactttgtcaatactacttgcagtatattcttcatcaccaattaaatatcccaaatttaatggatcttctagtagacttttaaaatttaagctttctttaggtatagataatgaaatgttaaaaaagttgctaatgtctcttttaactaaatcagaattttcatcaataatcagattgatatttacaacatttttagcatcagcctctcttttttgaagaagttcatcctcatcaacaaccatattaagtgtgaaaacatttttaccatctcttttttctaaacttgcatcatcaattattaagttagtattaaaaacatttttaccatctctcttggttaattcatcatcatcaattataagatttgctacaaagacattttttgcatctgcttttgcatctctcttgtgtaatttatattcattttcatcaataaaaagattcagattgacgacatttttagcttctcttttacctaaattgaaatcaccttgttcaatttcaagaacagcattctttacctgttcaggagaaaaattgacatccacaacattcttggcaacagcaactccggtaagcagtacaatcactgacgataaaacacttcttgataacttcattgtttgttatatatctctgtctgtgttatttgatattaaagataattcacaactccctttacaatcaatcagctgcctgtaacattcaaattgttttacttaataatactacatcagccccttaaaaaattaatattctaaaacgacccgacgaagaatgtagattaatttatccttttaggataataaggtaacaatgtttagcattgaagagatcattctactggcagtaaaggaagagatggtgtcggactctacatttagttatatacatatgggaacacaggatgctatgatttttattgactcatgggaaaatcagaaattaaaatgggatgaagtggagttttcaaacgttgaagatgtagatcaacatgataatttactagaacaatttctttctcaacaagaagaaccaaatacttctatgtcattggcacctaataataatcctatttttaactcatcttatgcaaatagaatgaaacagaaaagtaggaaattgaattggaaagatgttgatatagattcattcttaacacatgctaaaaataagaatggaagtagtaatcatatacatgatcaaacaatattgaaaaatcctaatttgggtggtttttcgggagatgcagaattggattcaatgttagggctgaatagagcagtacctataaataatggttctatgaatgatgttttgattgatattgataacttacatcaatcaagtttgaatttagaaactgattttgaaatggataagaacaacattgatattgattataatattgataatgatatggcagtatcagctttatcgagaaatattttaaatgctgatgtttctcgtagtttttcacatcaattcactacacctgttgttaataatcgagtttattcaaacaattatcaaagttcaataaatagaaatatatcatcacaacaaagaagacaagttagtgatactagtatgagaaatgtaagttatcattcaccaagacgtgagaatattcgttaaattactttttttttagttatacaaagtgttttttcgtttatacattcaatgtcaaaggacaagatacatattaaataatgaaattgttcttaatcagagggtacataaacttgtatgtttatccaagtatttgctaattatttcaacatttatcacataaaccaatgataaatgaaaccatcttacgtgaaatataccaattttgatgaattatatcaaatgtgacgttagaaggtgaacatccatatgccaaatgtgttgccattacaatatatggtacatcagtataatcaggaattatcatatttggatctctcgtataataaactatatttagctttttattatatttaaatctttgattaatccatcttcttgaagatgttaaatatctcattgttcttgtatttaatgtcacattatattttttaattttatctttcaatgtatttgttgcaataataccattttctctcaaaatttcaagttcaatttgtgatggtccataaattaaaaatggtggatctttgctaacatttgaagttttagaaaacaattcaactcttgaccatttatcaagcagtaatgcttcaacttcattatatactttggtatattcttctactatttgtaacattttatttttatcataatttatactttgttttatagtttctaaattctctaacgtcactattggtaacttcgaatctcccttagcagaacttggaggttcagttgatgtagattttgatctctgttttgataaagattttattttcattgtatcattgagtttgattttttttgttggtaaactgtgactattactattaccagttgtattgtttttaaaatgaatcgttattttattgaattgtgaattatttccatttttatttgatccattattattgtggttctttgtattgtcattatttataaattcagatcttattcttgaatctgcacttcttttccttgattcacctttagaactagtattggatgtctgtaataattttgctttctttctggatagtctatcatttaataaacgaatgtcttctagattcatcaaaggtaaagctctagttctagttggacgttgattctgtgtttcgtttaatagcagtgagggtaaattattgggtataatattaaaaccagattcttgataacctttaataattctttgaatatttctaacagtaattaaatctaagccttttatgtatgaactctgtcctaaaaatctatagctaaacataaagtcttcaatatcctttttgtctgaaatatcaagtatattcaaaattaaaatttttaaaacattttgtgatctgtaagataatttatcatcaaatgatggtaaggggcttaattgatataattccacatattttaataatttactgaacttgacccatatcaaagtccaatgattttttaattttattggtaatatgaaagatttaaatctgagtgatggtattatactcccattatttgagttatctacggttttaattgaatttattgatctcttaaatggtagtgtaagttcttttaattcttcaatttcttcaaaatattgtttggttaattcatcaatgttattattatccttatatgtaatatcatccttactatctttaaataaattttcaactttttggaaaaaataggtatcgatcaacaacataatttcataatctgaaataatatcatcaccatttttctgataagtagagaatgcaacatcctgtaaattgatattacatatttcagacatcaattgttttgaatcaactggttgatcatctctaaatataaaatcttccatgctatcatctttaaacatatctcgattctgtctttgtctgaatttatgtttatcttccaatccaaaagcacacgaatacactcgtaccaaattattgggctgatccatttcttcaatatgatgatatcttgatatatagcttgttaaactagcaaagaactgtcaatagcaaatacagttagttatacacaattatacccaatggtaacaaaaatcacctttgaaaataaaataatctcttaggttaccaggtcctgacgaaatcaatcgaaaaatattaagtttttgagacaatgaaatttccttagcttctgctactttattatttattgttgttctttattaaggggtctgctctcctgatagctcttactaatgcttgcgagttatagcattgttatactcggtttagagtgtagagtatagcgtatattgcttactgtaatgtctacatcaatgttaattttaatttagtgatttggctatctatataatctatttacatgatttagtcctttttataaatgatagcagtattaaatttcccagctacaatttcttggtggactttaccaaaatgttttaattgtaatctattattatatttagcaagtttcatcttattatcagaattaggttcaagaagtgatggaatatttgatggaattgctgatctgattcttttaccattagctaattgaccatattcattatcaccccaaacataaacatcattattatttaatgttacaacaacatgatttttaccaattgaccaagattttataccaattttctctagtttattattcaattcattaaactctttaatttcatttaaaattttaatctttttcggttcatttgtaccatgaatgaaataacctaaacctaattcaccctttaatccatgaccccatgataaataaattttattctcttcagcttctggtaatgattcaaaatcaaatgatgaattattattattcttcttctctctaaaagatttttcaaataattcatacatgttatctgatgtaaaagttgcaaatgctgtatcaccacctgctgaaatatcaatacaacgaggaaattcatttcttttaaaatgagttgatgataacctaacttgtgttggataaggtataatttctgtatcataattaataactgaaccaattgcaccatgagtatttttaccaaatgcccaaatacaacctgtttgatctaaacaaagagtaaaattatcacctgcagctatttgtttaatttctctatttaaaacattaccatttttcatatatttgtttaataaaataacatcatgaagttgattaataattggaggtttatcaaattgtgaaaattcaggtaaaccaaattgaccaaaagatttttcaatttttgtattaaaccctgttgcgcatgttaaaactgaacctttcttattcaaaagtaccaaatgttcaatacctgcagctatatcaataatcttacttgttctttcattaattggcatacttaatttaaaataattaactttataattacctaaccaacctttttcaatattatcaatttgattttgcatttctaatgattcaggtaaatataaaacttcaccattttcggttaatgtataaatagttttgttactaatttgaactttctttaaatttttaccctttaaagttgattttttagaattttcaatattattactaaatcctaacccccattgatataaatcaccattttcgtcaattaaagcacctgaattttcactcattacgatatctttaacaatgaaattatcaaatatatctaatctcttcaatacaggtataaattcgaatttttcatcagttactaaattactttgattattaccacagatatagacaccaggtattgaagaatcatttggatttgttatatttttagtaaaattttcaagatttaattgtttcttctgctttttatcctttattctttcatacatttcatcaaatgattctaattcattatcaccaatataatttgatttaataaaactccaattttgataaatttgtaatccaccaattgttgtaattaatgcaactaaaccaccaattaagagtttatatttttgagttaattgcattgttttatcttcattatcttcattattatagtttttataattattttgattagaattttcattacttccattggttgaaattgaatttaacatattatatgaattttcaagattttgcttttcaataaattcatatttcttcttgtatatatgagagagtgtgtctgtatcatctatgtctgatggtggttttttggcatcatcattattcttggaattattcttagcatcattattattatgatacgacacagttgaataatggatataacgatactttccaagactagaactcagtcgtaaagaccttactgaagagtctagtaatgatttagctactctattatgcatagttgtacttaattatactaataaatcagcactttacaaagtattgtttactctattcttaatgtcagcattaagtgattggtaatattattatgctaactaagtgaaaaaattcgctaattatatctctattgccagtacttcctttcacgggggagggttcttactttgtgggtacttactccattatactacaagaatacttcacatactatacagatagcaacacaattataatagcaatcatcagaatagagaacgcacgatagagataccccagagacagaaaagtgtgacccagtgggaacggaaggagggccagtccttaagagggagaaaattatataccattctatggtctccaggaaaatcaaatctccagatcttttcagtgactgtgaggaaaagctcgtgataatctggggttaaaattaaggagtattgctatgtgtcactttgtggtgtgctttccttttgattgtgcttgccacctcctcaagttgtttactttatgtgataatgtgtagatgtgtggttgtgtataaatagttgtgcttgtgtctgtattttctgtagtttgtagtttctggttagtaacttacttcacctatttatttaattatttatttattaccatacaaacacaaagcaaacaaatacattatattatattacgttaacatatacattaatatataacacactacaaacaaacttacatacaagtaattagataaaaatgaagaagaatatttcaaagaagattgaattagaaccaagacattttgatcatttaactaatgaaccaaaagttagaaatgctaaagaggtaacatttgatgatttatcaaattttgaagattatattaagaatgaatcatgggatgatgaatatgatagtttaaatgttcatcttgaatatttaccaccatttattcaaaaggaaattcattcagatgaatcaaagattaaacctcaaatgaatgtattaaataaaaaatttagaagacatttacatcaacatttaacaaaacatttaatacctgaaattaataaaatgactggtattaattatgaatttaaagaatttgatgaaggtttaacacctgaaatgaatggtattaattctgtttataaatggcattacgaagattctggtaatcatggttttgaagaagcagattatgaaaatagacatcattggaaagctcaattagatattaagtcaaattctaatggtccttatattaatattgactttaattgttctccaatataataataataatgataatgatgatgattataatgatgatgatgatctagttatcatattacattttacaaaattttatttatcttatctttttaacattttaaattacaatatatagctatatttaaccaacttaatgaacttaatgaacttagttaattaattaatattattaaagaaaatacaaaattattttatgtaattttgatattgtgtaactaaactagtatattatataggatgaaaaaactaaatagagtcatagcaatgaatcactcactgtacatttaacaggaacagctttgagcaggtttttcttcattatgacaagagcatgcagttttcttacaatgtgcacaatcacatccacctttacaagcacatgaagcagtaggacaaacacatttggatttatcctcagcacatgaaccacatttacagtcatcttcacattgacattttttcggacatgaacatgtttcctttacttcactatgacaagaacatgcagtttttttacaatgatcgcaatcacaaccaccttcacaggcacatgaagcagtaggacagacgcatttggatttatcttcagtgcatgaaccacatttacagtcaccttcacattgacatacctttggacaggaacatgtattgatttgagttttaggagtagagcattcacaagacatttttatttattgtttgtttgtttgtttgttaaataagttaatataatttaatgcaagacacataactgaaaaatgggaagcttaatcaatttaaataaacataattgagctttatttgcctaaggtgatagtcctaaggtgatcatcttatacatgtaatagtatatcttaggcataagtaactcacagtaaaacttatcctggctaatgtaacgcattgttagaaatttcaatatcgataagagctaaattaactcaataaaaaatggaaaaaaaaattaagcttaaaagcgataaataacgtggatatagaagaactgtaaagaagtgcaaaaatatattggacgagaccggagtcgaaccgatgacctttcgcttgcaaggcgaacgcgctaccaactacgccacacgcccaaaagttaactgatccctagcaggatcgaactgctgatcttggcgttattagcaccacgccttaaccaactgggccaagggatcttgttgttgattttgtactgtggaaaacactttgatgcgcaattaaatttttttaatcacgtgacaaacaatgtttgaaacttgtttttataatgtggaatactgatagaagattgtaatttaactagaaatatcattgatttataatgtaatatagtgtttttcacaatatatctactatatgatgaataatcattgtcgtacaagtcaaatcaaacatgtaagcatcagtatgttgaaccatcactcgtactaaaagccctttccgaaattcggataaaatttaaagtgaaaaatcaaaattaagcgaaaaaagggtacttttctcaaaatgcaaaaattttttttcaaacaaggacttttcatcttgagacactacatcatcattctagaatgttcgattgatgtacttaagataaataacataaaaggcatataggagaaaatctgacaataaaataataattatctccaggtcactaaatcctctcttttcttttttaaagtcggagttcttgttaattccatctagcaaggctacttccataccccatgaatagaaatgttataattaacacgccatcagatgtaaaattaaatccgcgtaattccgttattcccataaaatattttaaaagacaaaacttgtaccttatctcactcagcatatactatttaagcttaacatttgccttcgaaattattaaccttaaattttcctcttcttctttcatcaaaaaagaactattaataaaaataaagaaatgtctacttcatttagagcaattggtgttgttgattacaaggattggttaaatccaaaagaatttacatacgaaccacaagatttacgtgataatgatgttgaaattaaaattgaagcatgtggtatttgtggttcagatatccatgcagcttgtggtgattggggtgaaccatatgctccaatagctgttggtcatgaaattgttggtatagttactgcaagaggtccaaatgcaagattccaaattggtgatagagttggtgttggtgcccaatgtgattcatgtcaatcatgtaaacgttgtgaaaacggtaatcaaaataattgtaaaagtatggttggtacatatggtggtacatataaagaaactggtaaacattcacatggtggttacgcatctcatgttcgtgttaattctgaatttgcatttaaaattcctgaatcaatggattcaaactatgttgcaccattattatgtggtggtattacagcatttagaccaatgatgacttatggtgttaagaaaggtactagagttggtatcaatggtattggtggtattggtcatatggcaatcttatttgctaaggcattaggtgcagaagttactgcaatttcacgtaatgataaaaagaaagaattagcattatcattaggtgcagatcattttattgcaacagatgaagaagattttgcagctaaatatgaagattcacttgatttattaatcaatactgcatcatcatttagtgaaactgcagttgattcagttttaaatttacttgcaccatatggtcaaatgattttcattactgcacctccactttctgataaattaactcttacaccattccaaatgttgctcaataatatttcagttggtggttcagttattggttctccaaaagatattgaatatatgttagaagttgctgcaaagaatgacattaaaccagtgattgaaactttagatattaatgaagaaaatgttaaaactgcttgggaaagaatgaccaagggtgatgttaaattcagatttgtcttaactggttatgacaaatatttcggtaattaatgagaaagttagttttgcaaaattatatagttcagttttctagaagttttatactattctatataggataaattttacattcaaattaaaccaaattatcgatcatttatagaatatattggtctttgttcatattttcattcttttttttaaatcaacttgtaaattcaaaatttaattaaaacactttacattatcacagaattcaataaattttttatcagaatatttttttaatttttttgatagaaaaatggattttttttaatgaaattcaaaccactaaatattcagttaagacactgcatatcttactgtcaattaagacttgatccctaaataattgtcttgttgaaaaaaataaaaatttacaatccttggtcaaaaaaaattgcgaaggacatttaatcaaattgtcccagtgtccgagtggttaaggagccgccctgctaaggcggtgggctctgcctgcgcaggttcgaatcctgtctgtgacgattttttagcatgctaaatgccattattttttttgcaactcattgattactatgcatctttattatgcatattcaaaatagttttaactcttattgagcaaccaattatcacacttgagacaaaaaactattttaatctagaatatatcaaacataatcagtgatggatatctgtgaagcttttataccttaacccgttcaatagtcattgaaaggtattcgcgttgaaatattggaaatttacgcttgatctacaaactctgtgaagatcagttctttgttgattgatttacatcaaacatctgattctcatatatcaaaaagaaaatgaatccacttagaatgattatcatgggtgctccaggttccggaaaaggaactttaacatcaaaactcttgaagaaattacctcaaatacattcattatcttcaggtgatattttaagaagagaaatggccaacggttcagagattggtaaaatggctaaaagttacattgaaagaggtgatctattaccagataaatttatggcaaatttaattcaagcagaattagaacaacaaaaatggcttgatgctaaaacatcatttttattagatggattcccaagaactggtaatcaagcaattgaacttgaatcagttttagtaccacataattcagatattaatatggttattgaacttgatgttccacctgaggttattttaaatagaatttcaaatagatgggttcatataagtggaagagtgtataatttagaatataatcctccaaaggtaccatttaaggatgatatcacaggtgaaccattatttaaaagacctgatgataatccggaaacttttaaagttcgacttgataaatattttgcagaattagaacctttaagagagtattatgagaagaaaggtgtttatgttaaagttagtggtgaaacttctgacattattttccctaaattactctctgctgttgaagcaaaagttaaatcaggtttgtagatagtatttattagaataagtatttgtagataataaactgatggaatcttaataaaaatagggcctttttagtatttaggtatatggaatgaaaatttgatctcaaaattttttgatttaatttttacggagaagtttaaattgataaaccccttagttcaacgattatatattttttcttttgcatttttgtggcctatacgtttatcgatctaatcattttagttgtctactatacatatcaataaaaaatgatagaaaataaaatatcgaagtcccctattgataaaaaagaaagaggttcaagagcttgtttagtttgtagaaaaagaaaagttaaatgtgatgcaaatgaatgctttccaaatagatgttcaaattgtgtccagtttaatattaaagattgtgtgatacctcaacctaagaagagaaagagtaaaaagattgaagaacttctgaaaacgaattcatttgtgcaactagttgagagtgaaaaagtcaacgaggaagaaggagacaacacttctacagcatcaagtgtaacatcagaaaacaatacaaaatatcctgaatacgttgaaacagatattcaaagaaagtacccacagctgagttccatgaaattaaatccggatgaaattttagggcatgatgttaaattatttggtggatcaacagatagtgttgattggtgttgtccctttacggaagatgtaatctctgaatatgttgagaaagatttgaagaactcatcttcagtcatcattattgatgatcttgattatagatacttgattgatgcaggctgtttcagactaccttcagaagagatatgttggacatttatagattgtttcttcagtaatagattatgccaattccctataatatttgaaagagagttccgagaaaaatataaagatttgaaacaccctccaagtttattactcttacaatcaatcatttattcaggagcaaaattctatagtcaagcaaactggacaaaggaggagaaattaagacatagggaaaagtgtgatgttttatttaaaagagcaaagatattatttgataaaaggcttgaatttgatacattaacaactttgcaatcattattattattatccaattgtaacaaaagtcgaaatgtgttgaatactaaagttgatgtatcatatgtgaggcagacgcttgattactgctttgtgttaggtattcataaagtacgatcattagatcctaaaacgtcacaatataaggtcagtctgttcaaacgattatggtggacaatatttttactagatacattatattcattcattatgggaaggccatggtcaattgattcagttaatatttcagaaattccaatgatagaggcaaaggatcttagagatgatttagatgatagttctacagacaatgatccaaagacactctatttcatctatagagttaaattaacattatgtatacgaaagatatgtgaaagtatatcgatgataattcattctgatgagaaatgttatgaatcatttgcaacatatttgaatgactgtgacgaaatgatgcgtgagtggatcgaacaattaccaacatctttactgttcaaggtaaattctgaaaataataatgtttacaatgcctcattatctttggaatattatagtacattacttttacttcatcgtattcatattttgatatactctaaatttaataacgatgaaagaaaaccatcttatccatcatggggtattatttttaaaggtgcacatatggttgcaataatttctaaatatatcatgaagaatgattacatttcatttaatcaaaattttatcccattttcgatgaatatttcaggattgatgatgatgtaccatttatacaataaagataaaaccgttcatgaaatagccaaggaagatattgaaatttacttggaacttttaaaagaaatagcaatttattggccacatgcatccatgacctattattcattaaaatctgtttatgaaaacaaatcaaagcaatctttactgctcaatacattattacttcaacaaaaaatggtttccagatacgttggaactactaatatttctgaagaaatcaatgtaaaagaaagaaaacagaaagataaagttgagaaggaaagcgctagtccactgggaagaaagacatcgattatcagaaattccattgattcaattttaaacacaggtgaaagcaccacatttaatgcgcctaccaattctattatgtttaggtctaaagtttcagatgttttaggtaacaaaccagaaataggatcccttaataatacaataaacaaggaaacatcatcacaattacgtgataattcagtaaattcaaatttatctcaaaatacaaagacattctcaacagattcattttcaccagatttaccatcacagaataacatcacagctacaactgtcccatataaaccactacaactagagacacaccaatacatatcacagaatccattatattcagaaccaatcaatccagtgaatgtttcaaattcatcaagtagcatcatcaatgctggattgaaaaataacgaaataaataggttgaatcaacaaataccctcagttactaatatttctcaatatccaaatggtatcaatttagcaacaacaacacaaagtaatacttacggttatttagatgggaatttgagaaatcaaagtgtcgttgctagtaaactagaatttgtaatgccaccagatcttattccaggtacaagtacatcaatttggcaacctgaatttgatacctcattacttgccattaaaggtggaaatgataagcaaaacattgatatagattttgaccaattgtttagagatctgggatttaaatccatttaaatgtatatcttagagttttagataaatattaataaaagtatagacatccacatgctgtattaaggtaccattttaagtaaaacttgatgaacaaatcaacgacagatttttttgttgtaaaaatcaatttcgcttacaccggatttaagattcggaacgagaagattaataatgaaaagggaaattataaataaacggtgtcttcttcacttttcatttgctgtaactttataccagtgaaatagattctggacaagttaaaagaacaataatcaatgttggcttcttctaggattggtgtctcctttctctacaacaagggactgaaaagttgtttgacatcttttaaaaacacgtcgcttataaatacaactttaacacataatatcaagagatcaatattcacaaaatacaataacaaatttcaaatgactgatcaacaacaatataataatttgagacaagttaatcagtacaaggtagaatataaaaatcatatctatactgttagtcaggtacgatccgaatctacatcaagagaatccggaaaatatgaatcaaatactgaatcagacactgaaaaaactgaaaatccaaaaatagaaaagaagggttcatttaaagaaattgttgaactattgaagttacttaagggagaatggtccactctttcatttgcatttgcatgtctaatgttcagttcagctgttagtatgcttttcccatcaattatgggtaagattatcgatacagcaaaaccagatgaatctaataatgaagaattaggagatttcgttatacctaaaacaattgaaattttttctcataatataccaataaatgtattctatggttctttgatatgtatctttgcattcggttcattagcaaattttggtagaattgttcttttaagaaaagttggtgaacgtgtgatggctaaattaagagttgatattgaaagaaacattttctttcaatcatccaagttttgggataaatataaaagtggtgatttgatttctcgtttagttaatgattcaacagttgtcacaaaatctgttactcaaaatgtttctgatggtttaagatcaacaattagtggatttgttggtattggtatgatgctaacaatttctgttaaattgacaggttatatgtttttaattttcccagttttggtatttattgccttagtatttggtagaagagtaaaaaaagtttcaagagaaatacaacaccaattgggttctttaactaaagtttctgaagaacaatttagttttgttaaaacaattcaaagttttaataatgaaaactatgaagttgcaaaatttcaaaaggaagttaaaaagttatacgatttatcaatttatgaaggaagattaaatggttatttctattctggtaatggcttcattggtaatactttcttagtttgtttattatctgttggtgtttggatggttagacaaggcgaactctcaattggagagttatcatcatatttaatgtatacaatttacagtgcctcaagtgtttattctttatcaaacttttattctgaattaatgaaaggtgttggtgcttcagaaagagtttttgaattacttaagctaaagccagatattgatccatatgcaggtaagaaaatcacagtcgatggagatatcgttttcaaaaacattaacttttcttatccaactagaagtaatcatcaagttttcaataatttcaacttagaattgaaaaagggagatcatgtttgtcttgttggaccatctggttgtggtaaaagtacattcactcaacttcttttaagatcatatgaaccaaacagtggtaaaattttaatcaataataccgatttatcggaactcagtttagcaaacttccgtgaacaagtcggtattgttcaacaagaaccaatgttattttctggaactttaaaagaaaatattgtttatggtagacgtgatgtttgtgatgaggatatagctaaagtttgtgatcttgcaaattgtaccactttcattaataatttcccagataagcttgataccatgattggttcaaagggtactcaactcagtggtggtcaaaagcaaaggattgcgttagctagaacattacttttaggtgctaaggttcctcctgaaacactgaagacaattgacaatcctaatattattggagctgatggtagaatactgttaggtcctagtgttttgttgctcgatgaagcaacctcagcattagacgctcattccgaagaagctattaagaaaaccttaggattaagacaaagtgtgggattaactacaatttctattgctcatagattaagtactatcagtatgagtaatagagttattgtgttttctcaacatggtgaaattgtcgatgatggtttattcaataatatgatcggcaatcctgatagtgaactaaacaaactgctaaacaagagtttagatgggaaacatacagaatcagacattattgataaaactgaaaaagttgaataattctcacaaatgcaaagattaggttaatacgttgctaaaaatctttgaaaatggtattttgtaaatatttataggactaatggagttgatccattttatatacacaataggaaataataaaatttaataataatctactgttaatttttatcaattacccttgatagctccaattttatgtgaatcatcactgtcaattatttcccagatggcatagtcatcaccattgcaaaatgttattacatcgttggccccatcactaacgattgaatgttcagagttgtcactatatgcagaaataatatttttcacaccattagtgagtaggtatccccactcaagagatttatacatgttttcaaaaacttcagttattatggaagacggaacaagaattttttttattgaaatcaaagaaatatccaattcgttttccacatccatcattgaagaatatttagaaatgtaagagtctatatttcgttctaaagttaattgcggaccacccatagatgcatatgataaccattctaaaatttcagccatggattctgattcgttagatattgttaaatcgggagatatacattttttcatttcctgaacatttgacacaaatttcacaggttttactgaagttatgccctgttttttcatatgaataatgtcatcatctgcatttcttgtcaatatattttcaaaggtagattgaaagtgataagtatccaataatacattttcggcaaaccatagcagacgaatgtaatttttatcatttttccctataaatgtttcaaagtctgtcaaactgaatcttccaatatacatttgtgtattaaaacgactatttccctgtgaaaaagtagatttttttaattttaaacccgattttgtgtatatgtcagatctcaatttaatggttagtttcccatggctgacacagatactattttcatgagttacatctatgttactcgttattaatttgagatcctgtctgatttctttatcaagagataaaatatatgataggatgtgtaataagctactttcaaaagtaaaacctatagtttcatcattttgagggaggtattgtgaaactttctgtaaatctgaagttctcaccaaagcacttatcgtatcaacgaagttatgattgacaaaaacagactttattgcatttaaatcattttcattccttttacctgtgactaatgataaacgagagaccttttcttctttcatcagtactgctctttgcgtgtatgtatgtatctatacccttaatgttacacagagattgaaaattgtgaaatttgaaatattttttttttttcatgttgccaaacacaacaaaaagtcagtcgcgaatatcatcagtattattttgagtcatattaaagaaactggaaaaatccatgattacttcttacatcactgaaattattgaagtctatctttttcttttttattaatctctgactaacagaaacacaagcaaattatatacaatttaaactagagatgggatacaaggttataaaatcacaagatgagaacccgttttccaaaattgttccaggtcaaacaatagttgaaattcctgaattcgaattagaatgtggggatattctttacaaagtcccagttgcttacaagacatggggtaaattgaacgaaaagggtgataactgtatggtaatatgccatgctttaacaggatcggcagatgtctcagattggtggggtcctttattaggtagaagtaaagcatttgatcctactaaatttttcattatttgcttaaattcacttgggtctccatatggatctgcctctccaatgacaactgatcatgaatttggtgaaagatatggtccagagttcccattatgtacagtcagagatgatgttagaattcataaacttgttcttgatgctttaggagttaaagaagttgcaatatgtataggaggatcaatgggtggtatgttagcattagaatggacatttgttgatgatggtaaatttgtgaaaaacttggttgttttagcaacaagtgctaaacactctgcatggtgtatatcatggggagaagctcaaagacaatgtatttactctgatccaaaatatgacgatggattctacagtttagatgatccaccaagtgtgggtttaggtgctgctagaatgtccgctttattaacttatagatcaagaaactcttttgaaacaagatttggaagagatgcaccaaatgaaaagcaaaaattgaaaagtacattgaataatatatcagacaaaacaaaagaatctgaggaatcatccgcaattgttgatgaatctgaagcacatgacaaagaattcaattggagaattcataatgatggtgcaaatagaaagaaatcatttgagtcataccacacaagtcgctcaaattctttatcatctaacataagtaccgactcacacaatactactataacatctgttgcaagcggtgagctgcatactaataacacaaattcattattacaaaaaccacgttctagatctcgtcgtactcctcaacattatttttcagctcaatcatatcttcgatatcaagcaaacaaatttgtgggacgttttgatgccaattgttatattgcaattactcgtaaattagatactcatgatgttggtcgtgatagaattgaatgtgataatagtacagaaaaagctttacaatcaagaaaacaaccaactttagtgataggtatcagttctgatggtctattcactttgagtgaacaaatatttattgctaagaatatgccaaattccaccttaaaaaaaatagattctccagagggtcatgatgcatttttgttagaatttagtgaaattaatagcttattacttgcattcgaacatgaacacttatcagacctcatgaagaatgaaggtaattttgaagattggaatgaaacaattgatgaagtaaaggaaagtgttttcggagaggccgaagacgttgcagaatggtagtttactcgacttccatgtacacttttgtaatcataaatctgaatattttataactttacataatttaaattcacaataatctaactatacagcaattgtcatttaagtaatactaatttaaacaatatatacaaatctttgagaaaattgcagattttgaactaaaccagtaaccacgatccttctacatcgtcactttgttcttcattttccacatcagattttgaatcatcatttacttcttgcttatgcttacttatactaacttcctttgcataatccatcaaaacataaattgcattaactgcattctgaacaccgttttcacttcttattttttcaccaacttccttagctttttctataattcttgtgttagaagtaacttctttaagtgctttagccaaagatttactatcaagtgatttcaaagcaacaccacaacccatatcttctactcggttagcataaaatttttggtccccaaagaaaggtttgattatagttggtaatccaaatcttaatgatgctccagtagtacccgatccaccatgatggacagcagcatctatttgcttaaaaagccaatcatgtggcacatttccggaattaaaaatttctggcggtaattctacttccaattgtttattatttttatcacctaacctatcagaccaacctttattcagaatacatctcacatccgctgaaagaacagcttcaacaacagacttagttagctccgtaggatcagatacaacaattgatccaaaaccaatatacaccaactttttgttatcttttctagcatttgcaataaaatcacttaactctttagaaggtttgtaatcgtcagattcatctagaaaccaataaccagtcaccttaacccattcagggaaatccacagaaggtggaaaaacaacaggtgacatgttgtacaagaatggaacactgttttgatgcattgcagataaacttgttttacacaatcctaatgtttcaactctccattgattaatttgataacatgtacctctccaatacccattttcaaaagcaacatgtgtcatataattataagcacctcctaatttttgatctggaaccataaatgcatgaggataagctctggttctggtccatggcatagtaaaagctctgaaatatggaatttgtaatttttctgcaatatgaattccaccaatggatgaaggagattcaatcaatatatcagtatcttgacacgcactccaagatgttaccaacaaatcatcaatccaatctctaaacttagcctttgcctctttgataaaactataattgatactggggttttgaaccatcaatgccattaattcggatggatcacctgcaatttgatcaaagtctattccataactcaatatccaatccttgaattcaaggtgtgtaacaatttttaccttgtgaccttctttcagtaacgcttttcctaatgcaatatatggttgaacatcacctctcgaaccaatagtcaacaatgtaaatctgtatgatttttctgctttcaagaaagttttttgtaaaggatgatcttctataataattggaatgggttcatccatttgactatttatcttattttcgaacattttaattttagctgaattaaaattatcttgacttccagagatgaggttatcgctttgagataaactagtatttgatttattcttgaaggagtcaagcagtttcagaacttgaatctcacaatcatcccttgaatcagaagaagaaaattcaaaaaagagctcttcatgtcctcttataacaaaaaccaaaccacaatacccaaatctaaaaccactttccttattaatattctcaatatcggtcaatggtaaaatcattatagtacttgagccaggtaaggtagatctaaaacatataactgaattaccaacataaaattttccataaatcggcaaccctttcatcaaatacgcatgataagttgctactaactgctctttttcattcaatgaaaatcttttgataaatcttttctgagaggcatctcttgcccttttattcttcacaaaatatggatcttgaccttcctttgaaatcgccagattttcatcaaaatgtgaaggtgacccagagaaaatcaaattttgagtaaaagatgtaattccttgaactaaagacttagtagaccatctgtggttctcagatgcacttttatttatatcaatatcattggtatcttcatcagattcgttaacctgataatcaaaagtatcatcatcatcaatgttgtttatatattcatccacttcattacttttaaggttttcaggatcattatcatcatttttttcatctttatttacatctttaccaataggcaacaagcccaatgactttagctttttgaatcttgaaaaggaagatgaaggtttccgagaaagaggagcacttttcttactttcatcattatcagcataatcatctatcaccttcatattttcaatctcatcttcactttctgtctcttgttcttcttcttcatccgatgaaagaatcagatctctcaactccttgaacttgtttttcttaacctctttaggctttaaattggtggttgttacaaaagaggatgattttttcaaaacctccattttagaattaatcatatctgattctttccaatttttttcatcatctttcatcgataattcattaccagaattctttatagcatttttcatttcatttaaagcttttgtaccatttgaaaaaaacattacaaaataatcgtcgactgcaaaagatttagggttttcaattacctttattctcaaatttttagttgcaccaacaacagaagtaagttccaaatcaataatattttgtaatggaatctttatagcaacttgatcacccttatttcttgatgaaaatatctgttttttaattgaggttacccatgatttagcagcaacatggttttctgcctgcatccaatgtgttcgattttcggtaacaattcttatccatacaggagtcccaagatcaatatcttttgatattccataagtctctgctttaagtgcgattctgagatcaataaccaattctgggaagtacatttctttactacttgaatatattgataaagtgttttctttcaatataacccatttcctatgaattcttaaagagtgatatgatttgaacgataacacaccttttctgataactgcatttttattcttctttggtaagaatgcgaagaatagaatattattatttgtaatgtaaatatgaccctgtaataatacatcacccatcagccaacatggataatcacttaaaaactcttcagaatcatcaatttgaaatacatctttcaattttttactaattgctaaagccttcttttctttaaaatcttttaaatcatcattatcagaattatcagtcatccttttaacaacagatagttcaaatcttgattgattttgaggtaatactcgaattggagcatttgcttgacttcttatcgtatgttgttccgatggaagtggaacagaaatagtagaatgactattcaacgatatattatcatgtgaatatgcagcaccataattatcataaccgaattgctcattatgatcatcatttgcaaatttttctgtgtcatgataacttgaatcatcactatctattacctgtaattttttaagatcatcaggaataccagaaacagcattggtataagttttttcgtcgattgaatcacgattcctcatggattcaacttctctatcttcatcttcaatatcttgaaaaccagcataaacactagctgttgttaaataccctgcaaaacttcttgaaataccttgcatcatagactcagataaatcatggttttcgttgctttgactttgactttttgaatgggatagtttagaagaattgatattcattaagctgactcctgtaacagtatgacgtactggagataatgttttcctagaaatattattaattagttttgaagaagattgtgtaacttttttagcttcagaagttatggatttacttgaatatagggaaggaaattcaggagaaggtgcaatgctgggtctcaaattcacattctctgcccgattttctatttcatttaagctttcttgttcatcagaataaacactattggaaatatcgctgtccgaaccagtgttaatctccttataaactatgtcatcttcattgaaacttagcggagagtgtaattcgttatctgatatcgcctgactatcatttgagtttaccgaagaagcactttcctttctcttatgtcttctatgtttgatatttaaagttggggtaagtttactagctgaatgtaatacatgctgtgctggtttgactatcagtttgggtcctgctgtcagtatatcgcttttcttgaaagatttcttgctagattcatttttttctggactattcctagtaatagagcctgtattcggtttctccttcaattcactcattcgtattgaattctagtagtatattgaatgatgtgctttaaagagtatttatgaagaaaatcccctcatcaactgatcgaattgcccttgacagcggagatgaattgattttcaggtccgtgaaaatcaattcaacttcttgtaaaatacagaaaaattatgtaatcattccagaacaaattcttttatgctatatgataaggtaaatcgatataatacatcagatgacttaaccaaaagaacatatctctaagtatacttttatattgcatttacttgttaaaactatatcaatttatgaattgtgtgtaagatgttatacaaaacaaaaattttacctttttttcccctaattgctctaattcggattattatatttgtacgataagcttttaatatttctacacaggtgatattactctattatacaacggtaaaattcatataaataaggaagctaattaataaattgcttaattattcgaaaatgaaaattatttttgataattatatagttattctgtcccttttttatattttaagtaattgacacgatcatctacctctaaaatgacttcccttaagtttcgaagttcatagcgaccaaatagaaatgatattaaaccattaataacaccagttgcaaatatgacacacccgaaaaagtaaaataaaattgaagcccagggtgccctgtatgaaacaactgttatcacaggaagaaaggcgactgcaataataaatgaaagtatgaaatgccataatctccattttctttgccattttaacgtcgtattgatgtaatcaccaaccaaattctttaattcactgtatatttggaatttttcctcatttgaaacaaacaccatagtacttgcaacgtctatatcatcagatagattcttatcagaattttctagccctgaggtactattaagaaaagactttctaattttgaatgttgctgaataagcaaaatgatcagagtacgatccaacatttggaattttttcagtgaattctacagttgccttaagtggttgtaatacatcacaatcaaccaaagcatagtccaatctacaagcttcatcaggagctctatcagctctccaagtatttaatacagaatcacatgttgtggcagctctaattatttgttcccaaggatccatattctttactaactctaaatcagttttcccatttatcacttcccaactatccgtaagttttgcaattttttctaaaattttatattgtaatgaaccaggtcttgaatttaaatcaccaactaatatcaccccatgacctgcattttttaattcttccactattaatgcgatttcccaagcttgacaagctctatgtgtttcataagctgcatcaccaaattttgcatatggtgcatgcatatgagaatttaataatgcaattgttgatccatcaaataattcaagaattgtaacggcgacacttttaccaacataccaatcacctctatgaaatgcggatggtctcccattgattgggaatctatataagaatgtcttctttataggatatttagacaatacagctagcccaggaccagcaatcataccagatgaaaaccatctacggaatggatattttttacaacatgctttatcaatatactcccaatcttcttttgtccaaatttcttgcaaggcaattatatcataatcattactaatatcatcctcagcggataatctatcagcaattgccattaacctctcctttctaaattttgaaacatatttcaatccccaagtgttgaatgttaatagtttgaacacattttcgttttcacattgacttaaaattctctgatcattttttacttcatcattgtacatatccttactgttttcttgcatatactgtatgcggttattgtactccagtttagaattctcatccgttaccaatgttgaccctgtagattgcatctttacaagtatgtctctgcttagactcaggaagattgttttccttttaatgataaagttttgcaaaatttaatgacacatgtgcatggtatgggatcaaatcaatttttctcaatacccaaacaggcaggttacccgagaatattttaatttttaatgagccccataaaaattatattaatatttaatttatttcagtctaagtttatgtcattatataaggtatatttataaggtactaagagtatgcaattttttctagttaattaagtaaaatagcaatttgttctttgatatatgattattttgagttagcagcactttttcttaatatcgaatcacttttcagaatcaataatactattaaacatgaaaataataaacctataccacccatgaaagtataggtaccacctaaactcattgaaacttccattttatccaaacaagaaacaaagatagcactcattccacaacggaaaagattatttaaagctgtagcaccacctgaaatttctggaaacatatcaactaaaacagtagcagtaatattaagtgggaacatacaaaagaatgtaattaaaaagctcatcacaagaattactggaagttttataacatgttgaagacaccaaccaaaaacaatagctgccaggcaaactataattgctgcatatgggatataatataatctcacataaaggatattaaatggtggtatttcttgcatctccaactcttcgaatttatcttcatttgaatcttcatttgagttttcatgatgatgatgatgatgatgatgatgatgatgatgatgatgatgatctagaagttctttattataagtttctaagatagcagcatatttttgattgtataattccttcttctttttatataatttatctaaaagtttccccgataatagtgttccagcgacagtggctacaccgggagcaaaaaaacataatccaatatctaatgtggaatagtgataatatttggataaatgaacagtcatacttgtttgggagattgtccaaattgaaaacaagatagacgaaggtaataagatataaaacacttgaattcttgaaattaataaaaggggtttccaaggagcatattggttcaaatttttttcaaccaaagtttcgtcaaatttaactaatctatccttaaagagcattaaaattggtgctctatgaattggattttttggaataacacttaaattaccgacaaaagcacgatgagtttcaggtaccatgagaaaagctatcgttaagattacaccttgcagagcagcggaaaaccaaaaaattgccggccatttccaagcagttgccataacagcaccaagaaatggtgctataccttgaccaataagtgtaaaacctgatgtaagagcagttaaaccacctctatttcttctagttgtaaaatcaccaacacaagctgaagttatactaattaatggagctaaaaatgaagctagaacacaacgaagaaaaatcattaaccaataagttcttgaaactgctaaaccaacatttgtgactactccacctaaaatacaaattaatatgaccggtcttctaccatatacatctgataatgaggaaacaaatagtggtgcaactgcttggaaacataaatatgcagtaacggtaaaatttattcgttcctctgttgtgtggaaagccatttcaagttgaggtaatgcagtccaataaattggcatactcattgcagaacaaaatccaatcattgataaaaacaatgctaatgtcagtcgttccttatgtgtcagaattgtatagtcatcttcagcaattgtaagttgtttttctaatttcataatactgttattgctactaattgtggattctttatctgaatcggaaaaattctctagatgcaaatcattatcatcattagcgtcagtcatattttcgatgacactactgttcaaactttcagtatagtcaagagacatttttaaaagataaagatcttcttgttattattcttgtcttatatattcttgtttatagtctttcaaaaagagtcacaagttcgttatctgttgaagatagatctaagaatgaaaaaatacaaaaaaaaaatttaaatttaaacttaaccatggatttttcctaatctttaactcatgccttcggaagagataaatgcgcgtataatgacgggaaagtccgtaatccgtaaagatccgtatgtaaagccacaggcaatagggtatgtttatccgtgaaattaaaataaacctgtgttcgaattctttgaattatgtttagatttttttttttttttactttcacattctggtgagtgcatgaattttgaaagacttgattttcgaaacactctttagttgtcattctttcttttaaactttactcacattaattcacacaatggtagcagagaaaatagacggtaaacttattagctcaaatttaagatcaaatatacaaaatgaaattgcttcattaaaaatttcacatccagattttaatccaaaaattgtaattattcaagttggtgatagaccagactcttcaacttatgttcgtatgaaattaaaatcttgtgctgaagctggaatagatggtgaattattaaaatatcctgctgatatatcacaagatgatatgattaataagttaaatgctctaaataatgataaatcagttcatggtatattagttcaattacctttaccttcacaattagatgaagaattaattaccaatgctgttaacgttgaaaaagatgttgatggtttttcagaattaaatattgctgcagttttcaagaaaaattcaaaattaaagattgtaccatgtactccaaagggtataatgtatatgattgattatgaaaaaattcaattagaaggtaaaaatgctgttgtgtgtggtagatcagatattgttggtggaccaatgggtaaattattagaaaagagaggtgcaactgtgacaacccttcattcaaaatcatctcctgatcaagttaaattctttttaaaaaatgctgatgttattgtttcagctgttggtaaagcaggttttattcatggtgatgatgttaaatctggttgtgttataatcgatgtcggtactaattatgttcctgatgaaactaagaaatcaggtcaaaggatggttggtgatgttgattatgattcttgtgctcaagttgcttcaaaaatttcacctgttccaggtggagttggtccaatgactgttgttatggttttacataatttacttcaaactgcaaaagaacaatatggtatataaaattaacgagtagaaatatatattatagaaaaaaagactgtatgtttgtatgtttaattgtttattcatttatttgttggtttctttttgtcttcttagattaattataaattttttaattattttaaatgtgctgatgcattttcatagagagattgccaaacatacgcttcactcaacatcatttcgatatcatcctctgtccaatcttcagttttactagtatcttgtaaaaacattattatatcttgaaattccatgtccattatatgtgatgaaaatctccttaaaaatgcacaacaaacataaatatgaaattgactgaaccccatcggaaaattactgagatatgtatcccacattctaataatcaaatctaatttgaattctctcattaacatacaattcatccacctgaatgcaaattgaataaaatctaaattctccttttcaaaatgatttgacaatcgtggctcatctcttttaattaaatttttaagttcattaatttgtcttataataccaggttgttcatgaataaaattatcttgaatagtatccaaaattttagtcaaacaccaataagtatcagcttcaattatgtttaataattctttaggtaaacattgaggatcaaattcatttacatctattttagatgataaataatgttttaagaaaacatgaaataatggtgtaactaaatcatttataccttgaacataaccactagctggatgtctaactgcccataaataaagaattttctctaaggatgtatgtgtggtttcataggaatacaattttatgcttgggttagtacgtaaaacatcaatcttaatttgatgccataatgcctgatctctttgagatttaaataaccttgatatactatttgcatattcttttctctttctacttaaaactgaaagtcttgtacttacatttgtagacaaatatcccactaatatttgccaaactaatgaacgtaatgatgaaggtataccaccccatgtatgcatttttaaatttgttaagtcaaaactagtttgtgtcagtgatttaacaattttattatatttaatcacatcatcaattggtgcattttgtgttgagagaatgacaaatgggtctttcatgatatcttcatagtttttctttaagaaaggatataattcattaacttcttcaggtatttcttgagctttgttactatcaatgtttaaatcatctagacaattaccattactatcaattttaacataatcttcctgcgcagcaattctatcatctttcaatgatagtctatctaaaccataagcttgagaattgttaggtgtattttttaaacttattgtagaattatcacgttgaatacaatcatctaaagtatcatcccaatcatcatcagaatctataaaaggactttcattaagtcttttcggcgtagttttcgataaccctaatttagataatgtatttgaatgtgttctagttattgataatgaactacttgatctatttgaacgtgatgagctcattgatgatctgtccggtgacattgaccttacttttgatcgatctctaactgaatctaaaaaagatttagcatgcattcctggttgttctgcaatatcttttctagctcgatgtgcagatgatggttgtttaggtgatgtttctgaatgtgttaatgcactgatcgccttgaaaaaacctttagaactcgatgacgagcttttcaattcattaccattatttgacttattatttttaccgttcattaaactgtcattttgaacatccgattcataattgaaagaattgttatcaaagagaaaatctccagaattttgaaggtcctgctatatatttcaattaatgttagtatacagtgcaatatattttaaaaatacgaaaacgtaatgaaattgaccaatttttgctaatttctttaacatacccctgttggttgataataacctttcttccacatcaacagagtgtgtatatcttgttaaatggaatatattacaaaagaagatcaaagagttgtggcagtacactatattttatcaatgaaaacctcaaaattcagaatctctcactcgttccgcttttcttattatgatctgttaggttaatcgatatttatagtgaagtattgaattgaataaacaagagtgaatttattatacagttctatatagcataatcagacatacctaatgaccaaagatcatgcgtgtctttaatttggtatgataatgttctttgggagaatccctgttcacctaaaaaggaaagattgtcaataatatcatccaacaatattgctttacccgtaaacatagatcccgcatgccccgtatgatctacattgacaatatggatatgaaaatgataatatgatggctgataatgtacataaagtcgtaattgatcacttgtaataccatcctttgcataaattgtaggaatttcctttaagatactatctcttatacgtgttaaataatcaatatgtgaattatttaaacttctaattgataatatactatcatcataaacaacacaacaacaatataatgattgaacatctttcccatcccatttcatgtcaggtaaaatgatataatcatcatttttaaacagtgcacgttcagcttctgcaccgtcatagagaatattcttgacccatttcaaacgatctcccaacatagtctgaatataaggttttacaactttttcataagcttcaggtgtttctctgaccatatgaaaatttgatttttgatatttcttaatatgtgtctccgttgctggataaataagggaatatttagatgatggaagattaattaaattagcatgagaactaagtaaaccccagaagtaaatatcattgttagattccgaatgaacatctccaatatatgaattaacaagatctttttctacaagatttttgttgaaaatggttttctctagctttaaaatagcatctttaccattaatagtacctaaaatatcaatacttttgctaatatcatcatcttgaagaactttcttgaaaaaaaaaccctttcaagagctcactaacagtgttctgatcaatcatttcaccaacaaccaaagaaagaaacagtgaaacaaagaaaagctatataattccaaatacataaccataataaaaagttgaaaaaagactgcgccctggaaattaaaaaacctatcaccactgcctcccttggtattaattaacagcatcacgtcctttaattatatagttgttgtggtaaattcaacatctttgtctgcatccttttcttttagtttattattattacttaactggagtttctaaaactattgatccatatatcaaactcattattataattcattgatgcgtatccctaaattaattaaccattattcagatactatctcggatgtattcacaaaaaagaaagattatgaattcctggatactctaggtgcaggatctttcggaactgttagaaaagcaatccaaaaatcaactggtagagaagttgctattaaaattatattgaaatcaagattacatggtcatcttgatgtcgttgaacgtgaaattaatttattaagctccgtaaaacatccacatatcgttgaattaattgattcatttcaaacaaaacataatttctatattgtcactcaattggctaccggaggtgaacttttcgatagattagtcaagaaaacttcatttactgaatctgatgcatgtgaaattgtttatcaaatgcttgatgctcttaattatttacattcaagaggtatcgcccacagagatattaaaccagaaaatgtcttatatttatccgatgatgattcttctccgattgtattggcagattttggtgtttcgaagcaagttaacgttggtgcacaagagaaattaactggtgttgctggttcattcggttatattgcaccggaaatttattcaagtgaaggttatggtgatttatatggtttaggtaaaggtggttatactttaagttgtgatatttggtcattaggagttgttgcttatactttaattggtggttattccccaattagtgctcaaaatcctcaagatttccttgatgaagttagaactaataatttcgtcgtgtttcatgaaaaatattggtctggtatctctgaaaatgcaaaagattttattattaaatctttagatattgataatagaagaagacctagtgcacaaactttaatgaatcatccatggattcttaatcatattaataaatctgacaaagttaacgatatcaatattatttcaaatatccaagaaggtttcaatgctcatgctagattacgtagagctgtaagattgattatcatgaagaataagttagaaaaattaagacaattacgtgcatcttcagctactaacactatggattccgctttagcggatgatgatccagatgagtatttattctgtggaaactcacaagattctaatatattagaatcattccataatatgaagcttcctaatgatgagccatcaactaccacactttcttccattaaatcttcagacaatgcttccatttcatctgaaaagaaagaagcagcagcaaagttaaagagtaaagaattggcgattacatttcaaaatctagtacgtattgcacaagattccaaggatcaaatccgtcaatttcaagaaaaagaggaagctaacgaactgaaaggaaaggaatcttccgattttaatgaaaatcaatgatattttttacaatattaattaaaatcatcaaattctttttaatgtatatttttttgtatatataattctataaaatagtgaaatgtttactatagtagattcatgctttattaaaatcctaatgacgcctaagaaaattctttagtttttgcttcttcttttcattttcatttctcatcctattagacacattatcaatttttagtttctcaagacctgatcctatattgatcaatggtagttcactttctttcatttctgtaacaccttcaagaatacctattcgtgataactttgaatgatctgctaattcacattttgggactgaaagaattgtttctttcccatcagaaaaaatcagaaagtttgttatagttattggaatatttccgattttaatcttaatttttgcattagatttaccataactgatatgaatttcaatttctttgagtttaccatagtctagtcttgtaaaatcgtattcatctctattaccccttatcaccaattttctaagtttatttcgattcctaatcatctcgttaatagatgaacatattgggatgtttaaatcgctaaatgatatatcaagcacctcaacagtagcaggtaaactgtttttgaaaacagaaacatcaagtttgaaatttaagtattgaacaagaggaggtaatagcttaagatcatattccattgatttacccataatttgaaaatgtgtaatacttttcagattagaaaagtccatagacaaccagtcaattaaagtatctgtcgaaataatcattatttttagtttctggggaagtttgttaaaaaaagattgaggcaatgcagatgaaatagcaagttttagttgatttaacagagccaagtcttggatattactaaaattgggaaatccactagatgattttttcatttcatatgtaaggtgtttcaaaccaggtggtaaaataaccttcatttttggttcaaagtagcagtttgacaaaatcaaagattttagagtttgaggtatagaaatcactatattttctgatacttcacacgaagttaggttaagaccaattaaaccaggaaaaccttttatcgaataatttatgttcttgtcaaaataactcagagatagagattttaactgtttattctttactcgaaatataccgttcttattgttggaatggagtacagagatcttaagtctctccaaacagtaataattgtccagtgactgcaaatctataaaagtgtctgaatttaaactgatgtttaaatctgtgatataataacaaaaatcggatagtcgttcaaccaaccattcaaatttcatattttggtatgtcagactattatcaaggatatgaacacttatcgatgcaccattcaatgcgattttcctcaatgcttcaaataaataccccggtagttgtaaatttcgatcaattaaaactgtaacagtaaaagagttcaaacgtttcaactttataaaaaacattaaattcttcataagtattttcgtatctacaggataattccatatattaagcacaatagtcaacaaaccggataactctttcattttaaaacatgtcagatcgtcaagagaactgagtgataaaaagtcaattttgttgagcgtaataatgttaattctcctatattcttccaattgatcgtaaaatacatggcatagtttatttgctgattccaacaaagtaaaaagttgttgatttaatgcaagaacatcaccaatttctctttggaaagccaatttctgtacttttatcacaccatttttaactaaattcattaattttgaaaatttctctgaattgatcaatatacttcctctaacggtttccacggataaataggtttgtccagctaaaaatcttgaaactatgaatacttttgaacaaaaatataaatttaaaaaataatcaatctgatccgaatgaccaaataagtcaactatctttgataaatcaaaattttgaaatataacattattccatattctactttgaagttcaaagggtaaagaggggataatttttattatttgcaaatatctgggagttgcgaatctcttaccataagaagttgttcccattttttagattatatttgataataaaacatcaaagaagtagcttgataaagaagattgagttcaatatgaataaaaaacatagatcaacaaggtatacaattaacaaccaatacccagcgatgatcataaattgatgtgatctacagccgtttgtacactaaattttgttagcagcttataatatatccggtcctgccgatccgatacatgattaaagtcactggtacagtaaaacgatacatagtaacatcaattcatctataaaaaaatcatttgaaaatatttctttgaatatcctggatcagaattttctgtaattgtgaagacgtatcaatatctaaagctaaactggagtttaacagctcgacatcagaagcattatgtttatcattcatcatagactcatcagtttttgatgcacttccagtagctgttataaccattgcatcattattgaagtttgaaaaatgaaccaaattttcatccatttgaatattttcatcaatttcttcacttgatccttgatcaaaaaactcagaagcatcagatctattaaatgatacggttcttttatttgcataatttggaaaagaacaatcttcaaacgagttaacatttaattttttcctttcattagctttgttattagctggaaatgttaaattacgaaccacttcattcattcttctaagtattttgatcgaattataggtttcattgatattttcattaatatcacctttaagatcggttctaaacatttcttccttgatttcatcaatattgggtatacttagagtagaataattagaatttgattgattcatattttgtaacattaacttatcgtatttattgacaaacattttcacatcaagaggataataatctctagcatgccatcccatagaagtatcattaattttggccgtatttttcaactgagcgttttcatagaatgttctaaatgcaccaatgtcaatagttccattttgaatactctttattggatcaatgacaattgcaacataaggatcttcaaatccttgatgtaattgttgagtttgaacatcaataccacttaaccaacacccaaatcctggatgagaatgataccagcctataatatgttcttttttaattttgctttgttgtaatttagttaaatattttaacataaattcgtatgaatcgttttgtggattgactctactttctgtaccttgaacaggtaatggataacaatcaagtacaaatagttgacttttacgataataacctactaacattcccataatttcaatcgatccaccagatattgcatgcattgtcattttcatcattgctaacattgaaatattgactgtttgaaaataataggggtgtgatttccatggtttttcatcatttggtttagcttcgttcaaatatgtataaaaataatcatctgcttcatttacaagtaacttacgtgatatagttggtggtgtatctttaatggtcccactactattcttctctgcatctttctgtgatatgatgttctcagttactaattgattcagatagccaaacaaattaaatgtgctttcattgctatcatctgggccacttccgtatcgaacacattccctttctttcatatcagagtttagttgttgttaaataacttcatgaacctaccacatgtatgctggctcaatcttcgatcggctcatgggcactccttgaataaaattcatgttcccagtttattacgtaagaatatatttcaaaggtaatatatcactttatagtagattaatcctatactttgaaggcttaacatcaataaagataattaagttttatatcaattatatagaaaattatatatatcattaattagatttatagctttatgttttcagccttcatcctctcttttaattttgccattaatgaaggattacctaaaattaaatcaacttcagcatcaataaccgctgattgttcactattactactagcaccactactagcagagttaattctatgaatttttgtatggaaatttaaacttgtattagaatttggatttgaattattaccagattttatatttgaacctgaatcagatgacattgaagttacacgatttgttaatggagaatgaactgttggatgtgaagtatcatcagtttcaacattataatcaaatatatcccaatcaatacttggtttctttatatgctttaatgaatttttacgagataatgtaattgctggagttaataattccgtgttaggattgttcatttggaaatttgttaaactatgaatattaccttgaactgcctgtgcacgtaaatcagatgaactaccttttaaatttttacgaatatttggtaaattggtcatattagaattcgacaagccagctaaacttgttaaacttgcaatacttggggaactattcaaactcattatacttgctccacttaccgagtttttcaaagattgtgagtgggtatcattttccttgttgctattattactattattactgtttaaagctcttaaatcagttgaactgtttctgcaaaattcataagcttgcgattcagatctttcacataaattctttggagattgtactttatttgaatccatagaattatttctagttggttcaccgtgtgtataactatcagtttcactttctgtatcagtatcagtattatagttaaattcattatcactaacacttctaccacctatacttaaattatcattaagatcataatttaaactgtgtcttaataataatcttcttaacctttcaacatcatctaatacaacagatccacgtttacgtttccttttcataatttcagcaacatcgacctcaataaacatatcagttacttgatcataatgccaaatttttaaatctaaaccataaggttttggttcaatacaataaacataattatgttgaacatctaattctgtcaacatttctttatttaaattcatgaaataacacaataaaactctgatgataacacgatgagaaataatcaaaacatgatcctgtaatctctctaattctataataatcggtcttaatctactaataacatctaaataagattcaccacctaaacctggatatctaaatgataatttattttgtaaagattccatataatcagtaggatgtaaatatctaaaatcatcttcagacatcgaatcatatgaaccacaaccaagatcatttaagattttaaaacttttaaagtagaaatcatcacgaggaaaataatgggcagtttcaattgttctgttcaacgttgaagtccatatattaaaatttttagaatttgaagaagaggaataagcactagggggtatattgttattgttactgttattgttatttgtgctacctgtactcgttgttgtagtattactataattggatgacattgaacttcttctatctgttttaaaacttgatgtatcatttacaaaatctttactataatgttttagtttgaattcttgttgtttttttgcaataaattttggtaaagctttagcaaattgaataccatttcttgttaaatccgaatcaccacctaatttattctgtacattaaatacagattcaccattagctgttaaccaaatttgacgatctgcaagattgaaattcaataaaaagaagacacattgagaactcaaataaccacttatattaaaggatataacttttttaccagcatttataattttaacatattgaatatcatacttttcattttcaaattcttcagattcattgattgtttgataaactttttcataattgattaatctattacgaaaatcttgtaatgccttttctggatccatttttttataatcgggaccacttaattttaaacgaatgtttttttcaattaattctgtatcagtacaaattgattcaagaaataaaattttaactaaacctttagttcttttattaatagtttcaacaatccatttcctccttgcatgagttgtattagttgcatcaaatattccaacattcccatcgtcagataataggaaatctaataattgattaagagtctcctttgcccattgttcacgtaactgaaaatttttcttattattatgatcaaataaattagcatcatgaccgtgtaatgggtcattattattactattactattattattattcttattatcattaaaatctggtattatattactagttgaagggttaggagtttgcattggagtactatgatcaattgttggaccttgaacaggatatttacttggttcataaacattaagttgacgccttgtattaccaacattaaaaatttttgtattatattgcatccaattaagatatcgttgtaattttttcgttatataagatttaccacgagctggtaaaccaacacatacaataactaattttagagcatcatcatttgaggaagcagaatttgaagattgtataacggaggcgattgattgtgaaatttccatatcagatgattgaattttggaattatcaatggaaggtttagtgatacctgaacgagaggttctccgagacatcgagagatggtgtgttgtatttatagtaatgaatcgaagttggttgattgaaagaaagaaaagaagacatattcagtgagtcaggaaagtcctataccggagaaacgggtcctttccttcccaggttgtgaaaatttcatgtactgttagcaaattgcgtttcttataagggtgttatctttatatgactttctttatctttattggataaatggaataagtgtccattactctatattgtattctcattgagctatatgtgcatggtattagtatgctattgtaatatatgaatggtaatgtaatattgtatactatactatactatactatactatactatactatactatactatacagtacaacttagtatactgttgattacctaataaatctcacattattaacatgaatgacatctttaactgggcctattgatatatttcagtttaaatcttgcttctatatcttattcttatttaacttttctcagtacatatactcaacaatatgcaagatgaagacaacaaaggtaatactgagaataaacctattacgagggtagtaccaccacttaacttttcagcagttgaaaatggtttatatagatcaggacaaccatcagctttaagtcattcattccttgaacaacttaatttaaaatctgttgtttggttagcaattgaagatccaaatgattcattattaagatttattgatgatcatgatatttcatttttctataatttaggttatgatgcaatgggatcaaattcttgggatggtttaagtgaatcaagtataaagcaagcacttgaaataattgctgataaacgtaatcatccattattagtttgttgtggtatgggtagacatagaacggggacagttattggatgcttaagaaaattacaaggttggaatttagcaagtataggtgaagaatataggaggtatacaggtataaaaggtggtagaattttagttgaattacttattgaagcatttgatgtttcaacgatatcaataaatcctcaagtagcacctgaatggttacttcgatagtaaatagtttgattcataatcattaaatgaagaaaaaagtattacattaattaagattttattttattctattctttatatacatgggtaaagtaatcattatttatcattatcttgttgattctttgcttcaaaacgttgttgtgcaagtcgtacggccatttgtgattgtctacgtacattattacaatgttcccaaccaaatatactacctaacataagaccaccaaacccccaatttgctgctctacgtatatttctatgataaacatataaaactgatgaaaatacaaacatacatgtaaaaccagataatcctgcatctctaaaacatggtattgcagcaattctacttatatggaaatgttctaatgttaaatttgaaaggaatgatttaatttcattaccaacagagaatgttggtggtggtggtttattacttccattatcaaattttggtggtacatcttctagaaagataggttgactatcttgcttaacaggtgttggatctaccttgacttcttcttctgttgatttagtgaatggccacattgtccaaagaagataatcgtgattaatataatgagaagttttcacttagttaccttaatattaatattttcactatattgctcttatgatgaatctacatcatattatagtatagccttctttagtgtataaaatactacaacatactacaacatactatacgcatatatatacatgtactacaatactaccatactactttcttctgcaattcaagaccaccttatacacacacaatagtaaatcggatattaatacccgtttacccataataattattacgaactgtggttctgaaccgcaactttctcttatgtaacaattaagcttttctatttatttaagatttctctccttatcttcttttactacttatttatatgaatcttattgctttatagtttatcatcacttgatagatatgtcgtctcccaatactaaaaataccacaaataataataccaacaacacaaataatataaataatatgcctcctttacataatccaattgcaactcgaaggcaatcaactgctaaattaacatctccactgtacaacacccctggttcaatatctcaattatctgcaatttataaagatcgccattcatcatcttcaactacaaatgaaatacctgcttttaataataatatattaacttcaaatactccaaattctcgtaaacttttcgccccacctagaatgtcatctccagctattgaatcagatgatgatttaatttcaaataattcaccaattgggtcctatggttcatatgttgatgatccaactattcttaaaaatgtttcaaaacatttacataatgatcctcaaactgctttaaaattagcctcaggtgatattacaagagatttatatcaattaaatcaaccaacaattaaacgttcaaaatctttctctggtggtactaatgatacaattaatgaaagacgtggctcaatggcttctcaaatgcgtttacctggtggttttagaagagattttattcaaatgaagaaacaaaaatttggttataatttatcacaaccaactaattttactaaaaattttcttgaatttttaacaatttatggacattttgcaggtgaagatttagaagatgaagattatttagtctgtgattatgatacttctccaaattataaaattgatgaagaatctgcactgttatctcctcaacaacaattacagcaacaattacaaaatcaaaaacatttaacctcacaacaacaattagatgattcatctaaaacttcttcattaaaggctttttttttattaattaaagcatttattggaactggtgtgcttttcttaccaaaagcttttagtaatggtgggttacttttctgtattatcattttaataattttcagtgtattatcatattactgttatttagttcttgcacaatcaactgtcgctacaggaatttcatcatttgctaatctagggggtagtctttatggtagttatttgaaagttcttattcttgtttcaattattttaactcaaataggatttgttgcagcttataccattttcacagcagaaaatttaaaagcatttgttaaaaatactgttaactatgaatttccattatattattttgtcatctttgaaacaatttgctttgttccaatgtcattaattagaaatattactaaattatcagttgctgcacttttagcaaatattttcattcttacaggtatttcaacaatcatcttttacacagctaaagatttaattaaaaacggacctgccgaagttttgatgttcaataaaaatgattggtcattgtttatcggtgttgcaatctttgcatttgaaggtattggattaatcataccagttcaacaatcaatgcgtcatcctgaagatttcccgaaaattttgtttgcagttatggcagtttgttgtgttttatttatatcaattggttggttatgttatattacatatggtgcagatgttcaaacaatgattatcctcaatttaccacaagattctataccagtcattttaattcaatttttctacgctttagcaattatgttaagtgtaccattacaacttttacctgcaattagattaatggaatcccgtatttttaagaagagaagtagtggtaaagttgatataatgactaaatggtacaaaaattcatttagaacattaataacattaacaacttcattaattgcatattgtggatctgcaaatcttgatcttttcgtctcatttattggaagttttgcatgtattccattagtttatatgtatccaccaatgcttcataataaggcagttgcagatactaagttacagaagtacacagatgtcgttatcgttgtcctgggtttaatagctatgctttataccacttataatctattcacttagtctcggaaaatgcgtgcgaaatttttagacaaatttgcgagaattttcccaccactccaagtaataattgttgattaattagtatcatcaacttctctactattcatttatcttcacatctttttatatcattcttttatagtttaatagttaaactttatcaggcaaatacattcaatatgggaagatcattctattccgacgaggaagctacatacaatactccaggactaccaactgttcctagtcttgaacatccaacttcaactccaaatactgatgcaacatcaacaattaatcgttttggtaacattatcacaacttctccaggtttacaaaactttgtttccaaaattcgtaccactactattgaatacactgaaactttccttgaaaaatatgattatattacatcaactgcagtatcacatagtgcaatgactgctgatagaattgcaagttttaaagatgaaaatgaagttttcttgccaaatgcatgtatcgttttaactgctgcacttacaggttcaattgctgcaagaaatcataatttcctcttacgtgcaactgtaccacttttattagctggtactgcattaaattatacaatgccaaagacttatgataatgtatctgaaggtttcggtaaagttggtgcgtcaattgaacgtcgatacttcccagatttcaaaaatgttagagagtcagttgctaataatacccaacaaactactgaaaatgtaaagaaaattgaaaatgaagcttggaatggattggtaattttagttggttcaaccagagaaagtttagttgaaactttcaataaaaaaaactagctttgctttctttttttggaaaaacacacttctttatatttattttacaattatagataacgatacttatacatacttaataaattacttattcagtttgaacggaagattttacctaaatcaacataccttctaccattgacattcaaatatttgtaaactacgttttcataatttttgaattgtttgcggttttgttcagctaatgcttcaatttccccttgattgtatttaataaaatcacttttttcttcatcattggcatcttcagataatttctttaatgttccttccttggctttattaacatcaaaaatactttttaagtaaagtaactgattgtaaatcattttatcgttatactttattttcataacaccctgacaactatgtgcagtaccatcactaccaatacattttttaccgtagacactcacttgtctagtttcaataccacaatcatcacatactaaccaacattcataatatcttgcaatttcctttctgataaatatttctaaacttgcagctactaataatggatgtaatatatcatcacactttttacatttaatacctttaaatgtaaccaaatatttactattactttgaataccgccaaatgaaaattcgttggaacaatttgaacatttcagatgaaattctttcatatctctaaatctttcactatcaggaatggtagattctaatggttgtaattcattttgtttaacaatttctcttgccttagattcatatcttctactttctaatcctaaagagtttgctaatctaacaacatcatatccttcaactctagttaataatctatcaattggattgaaaatttgcttctctgcataatatttaatatctggtttataattctcttcattcttaccaataacttcaatcaacgcacgggctctttcagctacagaggttgctgtttcatcagccttatctgatgatccaccatcagtaatgacaaatgtaataacactaccagctttgataaccttaccttgaccttgtaatcttaatgcaacttgaacagcaggcatacttttaccacctggatattttgttggatctttggatagtttagtattaatacgtagtttaaccattggtatttcattagattcaaattctttggtaatatcttccaatttagaataaatcttagtcaatgcttcttgtggatcagagtcattcaaaatttgatttaacacataaacagataattccttagatagtggacaatattcacgtcttttcatatctaaacctttgacttctaaagttgaaacttcttcaccttctttattaacagtaacatttagtgcagcatactttttcttagaatgtaaaagtaatcttttgaaaacattatcaatatcaatttctaataacttatatctttcattaactttttctttgaagccattcccaatcttaattgcatctttcaaattatcacaacgtgtatcaatcataacagaatcggtatcaccataaacaacagttaaacctaaactttcagccaattgtctagtatccattaaaatttctctacctttattagtaactaacattgctaaaggtttagcataaaatctagagttcacataacctaaacaaccatacatagaatttgcagtaacttttaatgccatttgcttaatatctaattgagctaattcaattggtgtcaattttggatttttcattaatgatttaacctctctacgtctagtaactaactgttgtaataattttggtaaaacaccaaactctttattattacctggaattttaggcaattcatcatctgtaagattacttctttcaactgtagtaaaacaaatattgaattcttgaataatagatggatataaagaattgaaatccataactaaaatataattcttgtgtaaacctttctcaggttcaaaaaccaaaccaccttgaaatttagcctttttattactactaactgtattactttcttccatatcatcatcatcgttattaattgtattattaccattatcaaaattaattttgttttccttacgcaatagatctttccttctttgtgcttgggtttcacgatccggaacaataaatttctctctttcaaattcatgtaataaaatatattcatttctaccagctcttgtaccacctaacgtatgtgaccatgcattacctgctaaattagttaattgttttgaaattgataatatttgcataccaaatgcagttttacctataatcaaaacactttgtaaattttcattaagaactgccaataatttatttgcatcttctgcaacaattgggtttgctaaattaacttccataggtgaatatttctcacgacaaacaacttcatacatttcacttaattcccaattctgacattttggagttaaactttgacccatatcattggaaatatcacataataatctaccagctaacatatcacgaattaagaataaattataacgaccgtttgatctactgaatttttctgggaatactttacgttgtcgacgacctaaattggaccattgactaatatttaaatctttcattctgtgtaataaaatatctaatgtaacactttctaacttatgaccgatgaaaacatcaggatcatattttttaatcatacctgttaaacaacttaataaaatcttttcatttcctaaacatcttaaattcatatttttcttatctgctaatgattgaagaccgattggaagtgttgaggtaccaccgacaggtctaaccaatgtgacggtttctgttggttccaaatttgctgaaattggaacatcttgtggtaaatctttgtataaagctaatgaaactgaaccaacttcttgtctttgattcttaggatttaagtaagattgaacattgattgataatgtattcaatggtggaggtggttccttagtatataaatttggagatatatcatctggtgaagaaactgctaattcaatgttacagtgtgatacattttgtagaatgttaaaattacaacctgtaattgttaaccaacatggacccataatttgtctttgcataacaaatgattcaaatattgatgtattataaccgaaaaatgttgaaaatgtttcacctgcaagttctggtggaatcaaaacacctttactctttggtgtatcataaggtaataaaactttcaagtattctgcctcgtgtggaatatcataatgctcaaaggcatatttcatagtttcaggttttgctttgattgaatctaaaccaaatttatccattaataaaggtattatctcatcataaacatccattgcagtacatggttcaccttcttctgtagttgttttttcatcattcccatcatcatcatcagttaatctttgttttcgtggtaggaagtataaagctttggaaattccattaatttgcaccataccagaaaccattcttccatcttttgatttaattttaccataaagcaaaattgagttttctaactcaacataatcaagccaaaacatttcaactgaatcatcaccatcatcatctttcattaaaacatcattaccttctaatttttcaaatgtaatgtttgaaatatttgaggtattagattgtttagaaggtgatgaattaaattccatatttttaacgtttttcaaaggtgatgaatcaactggtttctttttagttttcattgaacttaacttgaaagatctatcgatattagcaacgttatttttacgtttagttgaaacaatgatatcatcgtcttcatcatcgtcttcatcatcatcactgttgatacttttttcagttttaatattttcattttttttaggttggttaaaatccatagaatcattagcatcaattgaattttcatttaaatcatctaagatattgaaatttttcgattcagagttcttgattggagaggaaggaggttcaaaattcatacttgtatcatcaaattgattggcagtgtaaaatacagtttcttcagaagttgtatgttcattctttggtttcttactggaaggagatgtaaaatcaaaagatttagtagtaattgaagaattcaatgatgacattggcattgaaaaagttttatttgatgctggagttgatgtattaaatttatctgattttaatgaagagaatggatttttacgtttattagaatttgaagatgatgaacccaaattggatttgaatttcattgatttggttgctttggaagtaaaatctgacaagatatcattaagaatatcaggaccattgtctgcttttcttttatctttatttttcaagattaatttttcatcatttgattgatttttgaaaaaagaatcaatttttgaagttgaatccttttcacttgattctttgacagttttgacctttttaattcttttgaatttatctcttggatcttcctcgaattcatcttcatcttcataatgtaattgttgttgttgttgttgattatcccatgcatcagctccagtttccgcataaccttcaccattatcatcaacaataaaatcatcatttaggacacgatctcttttatgttttctatattgagcttcgtcaacttcatcatagatattaacattttcatcatcatctgaatgaaagtcttcaacttttccaccctttcttgcagcacgaagtcttgcaagtttgtctgatttagccatattatcggtaaaggtgatttatgtttagcaaaggagtaattagaaaacaataaagagctagttaaagtaccaatttcaataaaaaatcaccgttatttgttaatgctcaacgcgtcaaacaaaaattgtttaaaaattcatttctcgcgttgtggttactgggttatattactgtgtgagttctttagtttacagtgttgatttggtgttactgtttgaattagcatcttttcaaattacttgacatgaaatagattctaaaatttggaatatcaacaaactatttatgtcaattgccaaaatttgagtgaatatagagtaagattccaaatcgagcgacatcttcggcaaagtttcctaattgagtgttttcaaatctagctcgcaatttttacaacaaatttagcaatttgaaattttactcaattttccgacgaacatgatattttatcacctggaggacaaggaacttggtactgttagggttggtccatatattcattaaatcaagtttaatgtcgttcgccaacttcaagaaagagaaaaatttggatttagagaatggtcaaggtagtaatcaaaacaatgaaattacagctattgtaaatcaaatatcaaatagtttatcaaaatttacagttaatattggtgatattacaagagcagaggggcaattaggaacggagaatgatacatctatgtcgagaaaatccacagctcaacaaatatctttatgcaaagagatgtatatagatttacgccggagtgctaatcatttagagtctttgttagatgaaaaggtaaaatctaacgataataataataataatagtaaacgcaatacagataaaacattagttacatttagtttatcaaaggattatcttaaagagcaaattgatcaagtttatcaaaactttattgttattgtacgtggatatcacgagaaactcaattctgctactgtaaaacaagaatttacaaaatgggaaaaaagtaggaattttaagaaaaataatggtggtataagtaataatgatggtggtaataatgtagttgaaaatgatcaaacaccgctattacaatcacaggcccaacaacaaataatgaaacaaaatcaagtatctgaaaccgcattacaatatcattctgatctgatccaacaacgagataatgcaattacttcaatatcacaaggtgtacaagatattaataaaattttcaaggatttggatgaaatggttaatcaacagggggaacagattgattcaattgagaataatataataaatcatgcaacaaatactcaacttgcaagtcatgaacttattaaagctgataagtatcaaaaaaagaaaggtaaatggacatgtataatattagttgcattagttgtatttttgctaatattttttgctttattaagttgacaaaactttaattttaattttttaatctcttattcttttatataaatgtatcatactaattatcattacatttagatttaaatagtttcttcttaatgttactattatatatattaaataaaatatataatataatacaaaagattttggttattaatataaactatcaggtatcaacaactaaatttaaatatatcatttatttaaccacctttctctgtactctctatcttctcccaagttttttcgataatttttttaacagttgataacttttccttttcttcatttgaaccatcaccagattcaattttagcatcatctgctttataaggcttaaaaattttaatatttgtatcttttaaaataatattttttttatcgtcataatcaatagaatcaataggataagttaaagataaatttttcaataataaagcaccatttttggagaaatgttgacttaatttacgtaacttaaattctttttcttgatcttgaataattttaccattttcacgaatagtttcagcaatacgatcattcggtatttcagatggagcattaagtgcatttgcaaaagtatcattaattgatagtttttgttgatgttttggtttggataaagtatcaattgatttaacgaaaaattcattaatagctataaagttaacatcatttgttaaatcaattttattatgaggtgactgtgatcgagaagaagatggagatgatgaagatgaattttttgaatttggtggtggagtttcaataagtgttatattcttacgtgaattatgactatgtataacaccataaattacatcatcattaacagtcgttattttgactctgtaaaaataataaaagttataaaatttcaaagttagtatttcattccaataatgataattctcttgtgcatggtagagatgaaaaaaaaaactaaagtactgtattatctagtataccagtgtacatacttataacctatgagttcatgcaataaaataagcatggtttaacagacgaccacaaactcggcgagtgggggatctagataataaataagattatatagagatatcaaatataagatatacctttaagattgagattgcatgcaaagcaaagtcttcttactcataaaagctcttagtgaaatgatttttgcaagtgtggaaaagagcgaggaagttgaaattttaatttaaaattatacttaaagtgttttacgagattcgaacatatgatcttagtgtgttgagatattttgtgttttgatatttattaatatttatttgttaaattttctttaacggggcaattcaggttcacagtcaatctgattctgatttaagattcagttttgaaggcaaataaactaagatcttttcattgtacatggataatttgtcttcggaggaaccttttgatccgctgactcatgtggttgatgataataaacgtgagaatgatgctacagaggatgaaattagtgaaatttactcaaatttgaaaattgatgacaataaactatcagatattggaattgataatgcattgaaagttgaactggataatgaaatagatgaatttcctggaacaatgatagatagggatgaattaatggaatcatctgaagatcaagatatattagcatcaccaaattcaagtttctcatttgatgatactttaagtgatcaagaagttgatggattaacaaattataatattatattggaatatcctcaattaacatttgaaaatattcaattattaccattttatgatgaattaaatgattggtttacttctaaagatatttctcatttagattcagtcttaaagttgtcaaaaaatgttacaattaatgatctagataatattaaacaaaatattgaacatggaatgaaaaataatacaaatattctagtatatgttttgaaactagcttatatctccatgggttgctttgaaaatgctaaatcagaatatgaacttaaacaaactatatttcaaaatatccttgcaataatacataatgatgatttactagattcattattcaaaattgtaatttcaaacattactaaactcacggatgtatcattattatgtaacaatatgagtgtgaaaaaacttgatgctatatcatatgaattcttttattgttcaaccatcatctatatcataattctttcattcaatacagaagaattgaatcactatgatgaaaagcaaacagtaatggattatatcaataaacataatatactgatagaaattttaaaatcaattgataaatggaaattaatatcaaatacttctgaaaaacgagatacaagcgttgttttagaatcattaacatctaaaagtactgataatgagaagtttattcttttagctgtaactcatttcagaattaaaaatgttattagtttgttgaataacctgattatatttcaatttggagatttacaacatatacgatcaacaaaagattttttaaaattcaagtttgaaacttctaattgttcaaaaattaaaatgtctaataacacaactaatgatggagaaggtgccaaacatgaatcaattgatccagaaaagtatagtatatcttcattggattatcaatattatgttaatgagttgacctctcgatatccaacttatataccccctaagtatgaagtgtcagaaatactagaaatgacagttaataataataataataattccccacctgtttcaaatctactaaatgttgaatcattattgattaaccaacatcaaaatttgaaaggaaacctatttaaacaatcaacttttaataacgaaataccagaaattcacatagcaactccaatgccatctccaacattaactccacagcataccggaaatactagaaattactccaatattactgagcttgaacatacctctaatgaaatcaagaaaaaactgtacataacacaatctaatttcccaaatatatatccatcttcagaagaagtccctaaaagtattcaagatgcaacaaatatttttttccatcacatcaaagatgactataaaacaaagcaattcactaatatctttgaagagtttgttgatattgaaaatggagttaaagattctgataaaattcacaaatcaaattatgtttacactgaaaatgacataaaggaaaatccgatgtttgttgatgaaattaaaagtttgcaaaatgttgagcggttttatagagaaggtattccatattttaaatcacttattgctgttattttgaaattattagtttccaatattattccaagtcaaaaaagttcagaaaatggtaaaactagacaaagaacggcaaaagatacaaatgatgctgagaagaaaccttacttaagtgaaaagttgacttcatatgaaaaacaaaaactcgaaataaagaaatctaaagagttaatgctaaaaaatggtacatccatcattttactgatacaaaaatggttgaaactatcgaatattttgaaatttgaatattttacaactttattgtttgatcaagattatcttatttatttatttagatatcttgacagtaataagattcaagcatatgcaagtaaagatgtagatttaccagaatcaaaaggacttctaaacaatcgagttgtttattgtgattataatgtcttatactacttaaaagagtataacttcttcaagaaagcaatatcattatcacaaaatgtaggcaaagttgttgatccaattgatgaaatgaaagattttgccgaaatttttgataatggtgctgaatatgatgaaagtgaagatgatagtagtagggatggcaacaaaaataaaggtgaattagtcaatccattgtcagtcattttaccatatgttcctcacaataaaattttcaaaatcactaaacccaataccagatgttgtatattactatcaaatttattacaatccatgtactacacagtcagtcattttaaaattcaaagaatttacaagttaataggtattagaccaacggaaattttaagattttatttaacattacacaatgatctattttatataccaatattgaaaacaattaaactgatgtcgccattcattggtaagaaatggagagcaaataatatggatttaatttcatttgtttatctatttcataaggttggattgaaggatccgtggttgaacaacttttttaatgcaggaattgaagagaatgctaaaagaggttacgataatgaagtatcactgagatcattgataaaattttataattttacatattatggcgatgtgttaaaagctcgtggttttgaacaggaaggtgaccagtttatggaggaagttgaaaagctgagcggtgatatattcaccaaaggatgtgttgaatctgattagagttttgtaatatactagttgtaaaaaaaagttaaaaatttagaaagatcaaaattttttatccgccgaggcagttaccgaaataggaaattgtgataaaaaatctggttatcttggctgtcaacaaaaaaagttttagattgatgtatctgaagcaccatctttattaatctcttaaactgttttttttttcggtttattccataagagataacagacttgacacggaaaaatatgaacgataaacaggttatttcttcgtccgtccaaaagcaaccaaaacctgtaaggaacagaggtggttgtttatcatgtcgtaaaaggaaagtcaaatgtgatgaaatgaaacctgaatgtaaacgatgctcaaaatccaactatgtgtgtttttggccaaaggatggtaatgaatcattatcacatagaagtaattttaaattagtgaaaaaatcgaattctgaaataaagttcatttcaatgaacaaaaataccattaagaaggcagatgtgattgatgaagatgcattaataagaaggtatattcgtgagaatactttgagtgttgtcccaactattttaaatggtatgaatcacagggagatgttctactatgatgcatttattaatggatttattgtcagtatttcaaatcaacttgcacatgaaaaattattacctggtacgattattgttccacgaggattacaggatccaataattaagaaactatgcataagttgtggggaatcatttatatttcgatgtcaagagggaaatattaggaatgatgaaattgtggtgaaggtgaggaatgaaagtttgaatattcttgacgaattaattaggagaattgataataactcaataatgcaatgtcgtgaatggatgttaatttatttcattctttggaatgcaagacaaaagtttttatatgagggaagacacgcacaaacgattaatttaatttcaggtattgaagctattaaactgtgggttgaaacacaaaaagtatacggtaatggaaatgaaaatgtaaatgtaaatgatgatcatgatgatagtggtgatttagtgaagtttgaaaatgcagatatttacattcttggagaagagaaagcttctattgaggaagttaaatcatttatgttacttgataaattagtcaataaacgtcaaatgattgaaaatatgaaatctgacaaaatttatgaagcaagtgcatttgagagaacattgttagagacatttgttttcaattattcatgtacgttattaactattgataaatcattgataaaatgtgttccgtcaccttatgaagtatttaaattaataacaccattgttggaaacacctatctttaattgtcctgttccatggatgaataatccaacaatgggagcagcattaccaattattgaatatcaagccaagattatttggttatcatttcaatacaatgatgggtatgatgatgatgtgttagatgagattcaacatatttatacccaatgtgagaattatgaaataccaacaattatcaatgtaaattaccctgacaaaattattcataaattattagagagttgttatataagtaagattatatcaattggagtttacatttttgcaactaagattcttcaaagaaataaaagagttgaatatgatgagaagataagagtaagtattgaaaaaatgtttgaaattttaaataatattagtcaatatagtcaaactggagttattgctaaatgggcatttgtagtaactggatgtgccattattgataatgaaaaaaggaggaaattacgtgaaagattattaaaatttattgatgttttgaaaactgggtcattaagaacaactgttcaatttttagataaagtttgggatgatgaaattggattagatgcattgtttatagaagattatctaaatttattagttatatagtaaagaatgatatatgatacaaatgagtgatgattaattatttattcaataattttggaaagtagttgtaaattctctacatgagaaatagataattgattaatgaaaattgtcattattttttcgaattcaataacaatcttgttacttaatgaattatatagcgattcaaatttattaataaatagtgaattaaattttgataaatcttgttgagtttgatttgaagcatttgaccattgaatgaaatcaaaaattgaagtttgaaattctttaaataaatctgtaaaattttcaataatagttaataaatgatatagtatttgatttaatggtacattaacatcatctgatgaataaaataaatctgatcttgaaattttagtgatgtaatcttcatgaattgaagttaattgttgtagattgaataaagtttcattaggtatatttaatggaagtaatttgttattatgtaatgaataaggaattgttgaagtaaatttaccattaaaggtatgtatattatttgagataatttcatttgttatgtagaataggatatgatcaataaatgaattaaattgaagatgaattaaatgaaactttctttgatatttaataattttacgtgaagttatctttttatgtataattgaagattgtttccaaattgatgataatttatattttaaatttgatagtttaaataaaatattaaaacttcttaaatattctttataagaagaacttataattgaattaactggtgttaaaactttataatcaagtgtgaaaaaatcaattgccgatgatgattctatattgatatttaaaagtcttgcatcaagtctattgaaaacatctttaggtagatttgttgaaattgaggaagaatctaatgatttttgtaaaatagacattaattgatttgaagataatgatgatgcattatttttcagaattgatgaaccattaaccaatattgaataagttaaatcaccattaaaagtaagtaaaaatctatgaagaaagttaatttcagagagataaattggtaacagtaatgaatttaaatgagaaataacaattttgtataatgattctatatctatttttaataaatcagtttgattattgtaattattttcataaaattcattacaccactgagaatcatttaaaaatgattttaaaaaattaatcgctgaacctatatgaaatattttttctgcagttgaaatagatataaaacgaggtgtattttccttaataaatttattagatgagaagaaataaggagttttatcattttcatctaatataccagcaaataaccaatttgatattgatgaaaagtaaggttttgaaataattttaaaataatttaaagataatgatgagattacgtcatcgcctaattttgagaatgaatataattcagataagaaaataggtaatgaatttgatcttgataatataataaggtaataaatatgtggtattaaagtgaaccagtcatctaatttgtgtcttaatagagataatgaagttgtatcagttataacattattaatagtattttgcaattccttgagagacgcgtcgaccgtagcattaagagcaattattataggtgaaaacgcgtaaatatcatcattatctttaatatctttattattattattattattattattatcattattatcattgttgttttcaatttgagaatttagatttttcaatagtagggcaagttgaacgaaatcatcaatgtaaggatcctctatctgtgaggagacagttactgaattatgattgaattgaaatgactgtgaattgtatcccaataagagtacatgcacgtcacgcagtaacatagtagtgtgtatagtctgtgtataccttgaacactctacaaagaaaagggcggagtgcacagtaagtaattacaagttaaagaggaaaaagctgggacgtagagaaaattcgagaaaatgaaaaaatgaaaaaatgaaaaaaaaattttgaagaagcggcggctcatcgggataattaatcactgaaaattaaattaaatagtcaacgagccccctccttttcagctttttagtggggtaaagtatttactgtcttatcttctttaaatagagtgctttatctggtatttctgtagttatttgaatgatatctcgagattaataatactctcaagacaataaacaatacaatggatgaaattgattcaatagacgcaacaactaaaacaaataatatattattagaaaatgcaaaatcttttgctgctggtggattcggtggtgtttgtgcagttatgactggacatccatttgatcttataaaagttttattacaaactaatcaacataaatctgcaatttcagctgtaaaatcaacaatttcaacaaatggtttattaggtttatataaaggtgtttcatctcctcttttaggtgttactccaatgtttgcagtttcattttggggttatgatgttggtaaaaaattagttttatcatttagatcaaatgaagatttaacaactccaatgtcaattacagaaatttcaactgctggatttttctctgcaatcccaacaactttaattgctgctccatttgaaagagttaaagttgttatgcaaactcaaactacaaaatcttcatttggtgcaactgttgcttcattatataaaactggtggtatttcttcaatttttaaaggttcagctgcaactttagctagagatggaccaggttctgctgtttattttgcaacttatgaaattttaaagaaaaaattatcaaaggatgatgattcattatcccttttagcaatttcaattgcaggtggttttgcaggtgttgcaatgtggacaacaattttcccaattgatacaattaaaagtattcaacaatcttcagctgaaaaaatttcaatgtctcaagttttacgtaaaatttattctactagaggtattggtggtttcttccctggtataggacctgctcttgctcgttcattccctgctaatgctgctacttttgcaggtgttgaattagcaaagaagttcttgaactaataatatcattttagctagcctttatgatgtataatatgatatgatatgatatgataattgtgtatattcctctaattaagtaatgattcttttttttttttttttaagaatataatttcattaaaataactaaacatctttatacagatatacagttacgggcgctcgaacattttcgccttgtcgattttttaacggaagttcatccaactatataattttcatgtctatatacacttggtattcttatactactggtatatagacgtatattttaattcttttaatgtaactatcagattaatcgtcttttcttgtttgttaatgattattttattgtatcattatgcgtatggcatttttcgattgcaaatattataattattcatttatttttgtttagacagatgatgtatgtgtatttttatttattgtttatttttttgtttttgtctttatatattatttttttttgtttttagtatcagatattaatgtgataaattagtttgtttgggtgtgttccacccttttttttaatttattttatattagtcataattaatatctcttaatatttcagtggagtttgcaatataatcttcttgcatctcttcatctctttgtgttgtttccattataatgtccgtttcatcgttcatataattgacattgttgtattctgctttattgtaagcatcatttgtattgttgtcattatcgtatagataatcttcgttatcgtcgccactttttccgctgtaatggtgatttgttggataatagttggcgtcatttaccgtatgaatatatgatagggaattttctcctttattttctttgtattcgtctgattttgcatactcaggtccattgtcctttgtatccgataactgtttaattgtaggtgtctccatgttttctttgtttttttcttccatagaattgtcatgaatagaaataagtttatgttgcttattatcgtttgttaacccttctttttttgaagacgggtttgacgctgagtgttgtgtgtaccgtttctcgatatcaggatagtcagcttttgcttttgatctcttccgatctcttgtattggggtttgtttctggaacaaaattttctctatcaaagtcttttcttagatagaaagggactttccctttggattcacgaatgtgtatgaatctttcttgcgcatcagtaggtagggtcttaaatgtgtcgatcttatgatcaatctccatacttttgcatgttatgtaacaatgtccttttctatgacaatttgtgcattttgaattaagtgggcatttgtttgctctgtgtcctattgttgaacacgctgtacagtaggcttctgataatgatacatgtgtataaaaagccgttgaaataatttgatcatctttagtaaatgagacatgatcttttggaggtggtagggaatttgagtttaattccaataaaatgtaatgaaaagttggaggctttttagccattgtgaaatctttaataaaatttagttctgcatagaaagttgattggtccacgagtttaccatattttgcaaaagcatgttgtgctgcttctcttatgtaatgagttctaaattgacctggaaatgttactttcagcattgcaaatttttcatttgatttagcattatattgttcaatgctaatgttgctaaaactttttgatgagttcaaaaagatgtttgaaattgttttggagacctcttcattctcaatgaatgaggggtcaatgaagaccttccagtagactacgtccccgtaaacaaaaggagttgtattggtttttttgatgtcttcttctttgtttgtcatagaagtattgtcaggatttctgtatatttctaatgaagtatctatttcatgaatttttaaagattcgaaagtgttctttaactcgatacttgcgtttcgttgaattaagttaatatcatctagtgtaaatgaggatttagtggttaaaacaaagattttattccatctgttgttagaatctatgtttgtgcttgttttaacttggtatttagtccttttgtacaggttgtcttgaaaacttttgctttttagtttgtaatcatctggagttaatgtaggaagactctgactagctgcttctgaatataaaagcttaccattgactcgtgaagaggaacctggtgattctcttggagtgtcttcattttcgttgttattttttgactcttttgatgagtttgtaactaaaattggatcttctttttgtcctgttgtactcttagtgtaaccgtcatcgggaggaggttcttgccggtggtatccacctgtgtccgcctcttgtaacgacattggtaacatcaacggctttgatttaatgatttaaaaaaaataaaaattaaaaatatttttcacatggccctctctctaaggaccccgttgaattccttcccacccgaaacttcaacaactaatctcaatcagtgtattccattactttatttttttcttttcttttctccttttaatcaaacaactatgggtatattcattccacaaacatcaattgcacatttaaatgaatacaaatatcaaagtgaagatagatcactcacaactaaatacattttaaaacctttttggcttaaatttgtaaatatttttccactttcaatggccccaaatatggttacacttttaggattaatgtttatagttatatctgatattttagtattttattttgatccttattatgatacagtttcacctcaatgggtttatttttatcatgcatttgcagttttcatgtatcaaacttttgatgcttgtgatggtattcatgctcgtagaactggtcaatcatctccactgggtgaattatttgatcattgttgcgattcaatgaatactactttaatggtgattcaatttgcttcagtttctaatttaactaccaaaacaccaattattttcattgttcaattttctgctttagctaatttctatctttcaacttgggaagaatattatactcataaattattccttagtgaattatctggtcctgttgaaggtttattaatgattagtggtgttttcattttaactggtatattaggtgttgatgaaatgtggcataaagttttatttactgttaatatttcagattcattacctccattagaaattacatcaacttatctttctgcaattgctggtgcttttgttatgggttttaatatttattcagctagacgtaatgttatcaatgcattgaaaactgaaaagagaacaaatgaaattaaatctgcaatggatggattaaaaccatttataatttattattcaaatatatttttccttttcttacttcatcctgaaatcattacaaattatacaacaactatgattattactataggttcatgtatgtcatttactgttggtagaattattcttgcacatttaaccaaacaatcatttccatatgttaatttcccaatgtttgtacctataatccaagcattattattagaaattttaactaaatttttcaaatggaattattatgaagcattatcattaacaatttatggtggtttaggtttaagtattgcaatttattcagttttcattattgaaataatttatgaaattacaacatttttagatatttacgcattatcaattaaacatccaaagaaagatttaaaaaataattaatttattcattcataatattagatttagatttaaatttagatttatttatatttcaaaatatatacagtaatagtaaaaagaattttaaactcaaattgattttagctagttttagcatgactttagcataattttttaatttaattatttagcttcttcagtagctggagctggagaaggtgctgctgcacccggtcctaaacctgcaccagttaattctttttctaattcagttaattgagtttcatttaaaattgcaattgctaatggaacaccaattaacatacttgtagttgcaacataccataaacttgaacctaattttaatgttaaagatttacttgcagatttaatattacttgataaattagtgaagatttctctttgctttggagagaagatatcctttaatgcttcaaaacgttcatataaagtttcatcagctggatcaaaatcatcatcatcataatcactttcttcttcactttcttcttcagcaaattcttgttctaatttttgaactgctgcttcaacttctgcatcttcttcttgttctaattcttccttttcttcttcttcttgaagaatttcttcaatttcttctgcaacttcctctgagacagcttcattaatttcttcttctgctgctgcaacagctgcttctaaagtagcaacgacttcttctgggttaaattcaacggcttcagacatgttcttagttatatttataagatactatataatacaatattaccctctattacaaccctctattttatatcgttaacgtccaggaaggggattcatggaaaataatttagtattggaaagagtgagtaggaaaaaatatgggtgtacaggtttaggactcggtcgacgcgacgggtatcttcttctagtagtagttatacatgcatttacatattaccttataatagcttcaaatggtacaggtatcaagcattctaccaacaactttaactaattgagggttctcacatgctgcacatactctctctttatcatttaattgtttattaacttgattttcactttgatgggtgccttctttaacataaattccaattctataagatttattaacactacgatcaagtctaactcttatacctaatccaattaatgtagctaatgaacaatgtgtaatagttggcgttattttaacattaactgatccaacatatcctttatctaaatcaggatgtttaacatgtatatcacttaaattgacaactgataattgacctaatgtaagtggatgttcaggatctgatattgatgatataagatcatatatttcttgtgcatcaattggttcatcatattcatctattttttgttctacatctatggtattttcatcttcttcttcttcttcttcttcttcttcttcttcttcaaacagataattccttatagtgttgtttaatttattattatatgaaatgtgaggaaatgtattatcttcattacttgatccacctaatcttgttggaagttgtgatacatctttcacttgtgggttagcgttaataggttcgtcagacatttgtttatgttaatgtcgttgggttgaatatttattaaaaatcaatcaataaaaacaaagctattaataatattaaaaatcaaaaagttgaaatttatgaaatggctggctttgcgtgtttcccaaaagggaagtctaatgcattaatactttgattcttattatcgataagtatatagggggttatactattgtataataacagtagagtgtgtgaagtttagtacttgtattgatctagtattgatttgatttaatggtttctttctttttctttacctcttcaaacaaataatgtcaaatctattcataacagccgctattagagatataattccaatgcaacaggaaccttatccgcatgaaattataagttatgcaaattcattatatacaacttcaaagataacattaccattatctgccgatgaggaaacaagtaggtatcatttatcatgttttgtcgttatagaaagttttaaatctgaatataatttacctgatccatttaggaataaaattccaattaatactaataaaaaattaaatttgttattaaattcatttagaaatacatttaacagtatgattgaatcaactccgagatctaatcgtactgttgatattcaaatgaatacaccaccatcaagtggtaaatatttaaaatcaactccttcacatattgattcaattagagcattaaaatataataaaattgatcaagttaaaaaatctctatttaaagatttgaaaaattctataaatgatggaataacaatgtcaccacctcaaacacctaaaaataaaaatagaataagtaaagatacaaaattatcaccatataaatcaagaactaaaattgttataacgacgccaatattagttacattttgtaataaattttacatacctgaacatttaacaagtaatattttgagaacatttaaactttatcaacatgttgttatgaattcatgggggttattagttggattagttggtataacatatttacaacttaatagacaagaattatcaaaacatttaggtggtaaaagtagattaattaatttattacatatttcacaacagggtggattatctaattttgaagttaaagaatatatacgagaagttgcaagattgatatctacacaaagttggattaagaatgccaaatacgaagattatgatgatgataatgatgataatgatgctgtcaatgaaaataatactaatgaaaaaaacaccaatgataataacaaagaattgtataataagatatacccttcacttacatgtttcatcaccccatcagtgcagtacttttccatgagaaagtcgccacagatagagcaatggatgaaacacctacgtgaagcgtacaaagacagagacttatagaatagaatatcgattagataacaagtcaaaacattacgtaactctctctataaaattttttttttcgtgaaacttcttttctgtcataacccttgggtacattacgttatttttttcacttttgtataaccgttatagttatttgtttctggaaggaagtgaaagtagaggtttctctttcatatattagttattattcctacttatttttatttttatcctcttttaagtaattttattgatgactattgggaacggtaaaagatcaatttctgagtccgaaaattcagacataaattcagatatcactaaaaaacaatgtattgaatctgatgaaacttcaattactataaatggtgataataactcaaagtataatgataatgatgaaattatagaatgtgttaccttagatgatgataatgatatggatcttgataacgatattgataatgataatgataatggatttgcatatattccacaatcggaaactcagtggcagaaaactgtggaaaaagttgttaaatcagttgtttcaattcattttatgcaaccagttaattttgatactgaaacttcattatgttccgaagcaacaggttttgttgttgattgtaatcaaggtattattttaacaaatagacatgttgttggacctggtccatttgttggttatgcagttttcgataatcatgaagaagttgaagttacaccaatttatcgtgatccagttcatgattttggtttccttaaatttgatgttaaaaaagttaaatatatgaatattcaacaattagaattgcatcctgaattagctcgtgttggtgaagaaattagagttattggtaatgattctggtgaaaaattaagtattttatcaggttttatatcaagattagatagaaatgctccagattatggtgcaaatacttataatgattttaatactgaatatattcaagctgctgcaagtgcaagtggtggttcaagtggttctccagttgttaatattgatggtcatgcagttgctttacaagctggtggtaattctgaaacttcaactgatttctttttacctgtttggagagttaaaagagctttagaacaaattcaatcaaataaagaagttacaagaggtacaattcaaactcaatggactttggaaccttttgataaatgtagaagattaggtttaacttctgatattgaagaacaagttagaaaattaggttctgataaaaatggtatgttaattgcaactattacattacctgaaggtccagctgataatttaattaaagaaggtgattgtcttatttcaataaatgataaattgattacaagttttgttcaagttgatgaaattttagatgataatgttggtaatgatgttgaatttttaattcaaagaaatggtgttaatattaaacatactattaaagttggtaatttacatgatattacaccaagtgaatatatttatgtatgtggtgcaactttcaatgaattaagttatcaattagctagaatttatggtatacctgtcaaaggttgttatgttagtgatgcatcaggttctttccaacttggtggccctgatataaataattgttggattattgattcaattgatgataagccaactccaactttaaatgcatttattgaagttatgaaaacaatacctgataaatctttcatacctgttaaatatcatcatttaactgatatacatgtcccattatttaagaacgtttatattgatagacattggttatcatcattcaaaaaatcaattagaaatgataaaacaggtttatgggattatgaaactattcaaaaagaaccaatcaaatctaaggaaattgaaattaagaaagctaaatttttagatttaccaactgagtttgaatcatgtaaaagattgaatagatcatttgttcaagttgatgcaatctatcaattaccattagattcttttggtggtcatgttagaagagttcatggtgttgttttcaatgctgaaaaaggttatgttattgtttcaagacatgctgtttgtcatgatttatgtgatattaatgttacaattggtgaatcaattattgtacctgccaaagtgatatttttacatccaacaaagggttatgcaattattaaatatgatccaaaattagttgatgcaccagttgaaactcctaaatttagtgatgaaccactgaaaagaggtgatagaattgtttttattggttataataaatcattaagaccggttgttgatgaaactaaggttagcgatattggagttatgaatattccaactaattctaattctccaagatataaagcaactaatgttgaagctgttttaattgattcaacaagtggacaaaaatgtcattctggtattctatgtaataaagaggatggtgttattagaggtttatggttatcatgtgacggagaggatgaaaagttatatacaactggtttaaatattactgatattatgtgggaattagaatttttaaataaagatgaagaatctgaacctgatttaaaaattattgatgcagaatttagctcagtttcattatcaagtgctagaattagtggagtttcagatgaatggatttctaaaattgaaaataaagaaaatattgataaatttcaatttttatatgttccaaccatttcaattggacttgataataaaccttcatgtgatttaagacctggtgatgttctattaacagcaaatggtaatttaatttcatctattaaagatattgatgatgttgttaaagtattaggtaaagatgaagatattattaaatttagagttgtaagagaaaaggaagaaattgaattagatgttaaattaactagaactaaatcatttataactgatagagttgtattttggtcaggttgtgcattacaaagtgcacatcatggtgttagacaaactattaataaattaccaagtgaagtttattgtactactatatcaaatggttcaccaggtagattttatgcagttggtattactaattttattacacatgttaatgaaattccaactagaactcttgaagaatttttacaagttgttaaaaaagttgaagataatacttatgttaaattgcgtattgtcacatttgataatatacctatggcacaaacattaaaggtgaattatcactattttccaacagctgaatttagaaaagttgatggtaaatggaaagcctttgtagatagaaaggaaactaaaactattgaagaagtgaaataagtaaggactctcaacactcttcgtaactctatatagtaataaatttaataaaataaaagttacattaattagctcttgctctatatgggactaagctcctaattactcctaacgtaagttggtttcgctaaaccttcctaattcgattaatgaattagttaccttgtatacttggtggatacataaaaaatcctaccacagatgcataccggcgactatatccaaatagattgtagaaaaattgtcttctattttgagtttataaactataaagtattatttatatatacacggggatattatagtaatgaagctaaggagtatactctgtacttacatgtttggtaataatctttctaatattttagattgagtatgagtagaatatgcagtacctgttctcttctttaaatctctacttgaaaaaccagcattaccatgttttctaccttggatacctcttttatatccacctgcagtctttctccatcttttgtaagtagctctgtgtgtctttgatgcaaatctgagtgcagaaagttgattaacagcttttaaagccgatacaattgttggggttggtctgaaaagaccgcttatagcagagagagcaaacatttgttggttacaataggaaagcaagtcaggtgaaatgaatgtaatgatgctaataagttggaaaattcatgttaattcgacaactcgaaaatttcaatgcgtcgcataaataaaaattattattaaattggaacctcgatggatcttctttctgactagtgaagctttggatgcatactaagaatatatcacttggttgtatttacactgtgctttgaagtaagttaaatgaactttagtctgattccgactcagattctgagtattgcactagtttcacagatttaggtttcgattcctctttcttaagattacagtctttggcttctgtggacagtgtctgtatgtgttctaattcatcttcttctatatcatcgtcttcatcgtcttcatcggttgtactttccaactcttcttttctttccctgaacaattctaattctcgtttgaaagtctctttggcggctttattactagcttcctttttactagctaatttcccataaaactctctagtgtctttacgaatacgatatgaggaattttgcttctccattttctttcgcctttctctgtataagtattgacgatggttcaacaattgctcctgaagaccttttcttctacgatggttctctgactgtgtctctgaagattctttatcatttgtctttacatctccatctggtagtttgtctactacagattttacatttgtagcatttcctttctctgtatggttctcttcaacaaacctactcattactaagataagtgttcaataacgtcttaattagagaacactaccccaaaagcgtgttgtagtgaaccgcgatcccctatcaacacttttttcactaaatttcaaacttcactccatgcttaatgtgaacttttttgtcttttgactgttggtatctttgtttatatacttgggtgtaatgcagtatcgtggaaacggatacgggcaacagggagaaggttatcaaaaacaaggatatcctccctatgataaaaaaagacacttttcttccgataatagaactgtatataatcaaccgtacgatcaacaatataatcaacaacaatataaccaaacttataatcaaagttataatcaaagctataatcaagggtatagtcaatcgtatagatatgaaaaacgttatgataaatattacgaaagtacagctaacgaatatccacgttcaaacagtcattatgatcagtacggtcaaagctaccaagaacgatatgaaaagtcctcatctaatcatactccatcttccgggcatacaccttcctcatctttcactcatacaatacagtcacaatcaaacaaactctcccctatgaataataaaacgccaaataacagtaatgaatctacaaataaggggaaagttccatcagtaactaaatcatactcattcgataatataccatactcaaatcttatctcttcaataaccacttcaaatcatgttgatagttctgtgaaatcttttaaaactgtacatattaaggattctgacggtaaaaagaaatccaaaattgagtattacgatggtgtattacaaaaagttgcagatcccagattatctaatcctgctttgtatgagaagatgatatcaaaaaacgtactgctgaaatgtattaaaaatccacaatcagaaatgatgaaaccctcatttaaatatgataaatattcattaggagataaaccatctaatgaaattcttatatggaatttacattcatctacaactgcactaatcattaaaaataatttttcagtttatggagcaataagtgatgttaaaattattgatgatccattaactggtgttcctatgggaatgtgtttgttaagttttgatggcaaagttgaacaagcacatcaaacagctttaaatgctgttaataagtctaataaagttttacaaattgaaggaagatatatcagatgtggattgaatgttaacaatgagttatacgatcaaatttacaaaaaaactgtacaggtacgtgatgagaaactaagaaaaagtaagattgaggatattaaaaaggaagagaagttgaagttagagaaaatacgtttagaaaagcttcaaagagaagaaagagaacgaataaaaagagaagctatcaataagagtatgagtgagaaggccattaagaacaattctgttacaaataagttgaataaaggctcaactgttctgtcttctcatgataggcatattttaccatcatcatcatgttcattaagttttaaatttcagaaccttattgcaaatcgtcctttcatttttatttctgataaatatgtctcttcaatgtatgtcagttctgatcaattgaaaagatttttattcaagtataatattaatagaatattacaacaacgtattgggttttatctaatattcaacaaagttccagacgctttcacttgttttgacaatgaagatggtagaagatttcttacttatactatgtatatgacattatacattcctgataaccaaattgatgatactagggtcggaaaattaggtaatatcaagtctgcacagaatcaattaaataaggaattaactgcttatttatttaaagatatacgtgaaaaattcattgggaatcttattattgatgttatgcaaaaggacgaaatgaaggaacttgcgcaagtatcacgtaaaaagagggaagaggaacttcaaattttaaagaagcaagaagttgaaaaccaaggaaagttgaaattaaacaatgatgatgtaactattgttaagagactagatttgaatatattcaaaaagaagaacattaagaaacattttatacctgtctctcactcactgaataaaatcagagctaatagaaatagaactaaaaataaagctagtcaagagacgacaagtactgaaactgagaatggtagtgaacaagtatctgaatctgagtctgagtccgagtctgagtttgaatctgaatctgaagatgaagaaattatagaaactgaaaaagaaaacgaagaaggattgaaagatgataagcgtaaacatacgctagaacctaccctcaaatcagcaaagaaacaaaaaattgacgaaggaagtactagtccaactattgatgatacactaaaattagcaccacaagttgctgctcctgttattgataatgaatttcaaccttcgaataagccacctggtcctgtttatgatgatgattttgcaattccattccaaccaactttagaaaatctcaaagaacatgttaaaactaaggaagattttcaaatattattggaactatctaaagatattaatatttctaaacctataaaagatatcaatttctgggcttgggaacgtaatgaatctatgaaagagtataaacaattaatggaatccaaggatgaagaaggtgaagatggtgaagattttgattttgcagaagaagttttaaccaataaagaattacaaaacacaactggaagttttagaactgaaggatatcgtaaaatatctgataaagataagagaatatatttattgcatagacgtaaacaaactaatttgaatccagtgaaacataatgaagatgaagaatccaatattacaacacataacaaagttcaaagttctagagttaatcgtgcaaatactagaagattcgttgctgatgtatctgcacaaaaacatataattggtgaaactgatcttttagatttgaatcaattaaacaaacgtaaaaagcctgttcaatttgcacgaagtgctattcataattggggtttatatgcattagaacctattgcagctggtgaaatgattattgaatatgttggtgatagaattagacaacaaattgcagaattacgtgaaaaaaaatatttaagatctggtattggttcatcatatttgtttagagttgatgaaaatactgttattgatgcctctaaaagagggggtattgctagatttatcaatcattgttgtgaaccatcatgtacagctaaaattatcaaagttgatggtaagaaacgtattgttatttacgctttaagagacatcaaaaaaaacgaagaacttacttacgattacaaattcgaaagagaaaccaatgatgaagaacgtattgtctgtctatgtggtgccccaggttgtaagggatatcttaactaattgtataatagatgtaacagattgtatagagataaccatatcatatcgtatttcgtatcgtataaaaagacgcgtccattgatattttaacatttgaaaaattttgaaatttcttcaatttccattttcgccacccatgcgaagataagtgacactttcatgcaaatattccaatttctgaaattaacatgtttttcttcgatttatttaattttagatttattcttctttctattcagtaaagaaaacatgtccgaaatgatggaagtagaggactattcaagggtaagtgattgcaatatgatttgggttaagggttgttatataagaacttgagtatatttagttttgaataatactagcttgaatgtgatgagaactatttgcattagtgcttcattgtatcattgcatttactctttttttttcttggagggccttttaggaagatacttttaagggggttgtatttataggtttcggtaatcactgtcgctaggtgcatgatatagtatttgttgaagaattatcagtatatgttggtatactgattattcatgatgccgctatttgtgttgcttcgaattaatgttgccgtgcttttagatcacactctatagttttatttctaagggtttgaaggattgaagggttttttttgcatcaatcaatgtatgagtgatctatggcacattattgaatcaatcacgattctgacaatatctaatatatttgatagtcttataataacaacttttttctctgtttatttattatttctgaataaccaactaacattaatatctttttttaattatttaaggatcgttcaagatccccagctagagaacaagaacgtgaaagatcacgttctccacgtcgtgaatacgacaatagaagagaaagaggtggttttagacaaagaggtccaccaagagaatatggtggtagaccaccatatgaaagaagagcatttgatagagcaaatgaatatatacaaaaagctaatagaaaatatgaaaattcagttttcattggtaacttaccttataacatccaatggtatgagataaaggatcattttgcagctgcaggtccaattgttagagctgatgttgttacaagtcatggtaaatccagaggtatgggtactgttgaatttgaagatagagaaattgcacaaaatgcaattaatatgtttgatagaactgaatttaaaggtagagaaatctttgttagagaagatttacctccacctgaaaagaaagcaccagaatacagacaaccacctccacaacaatatgaaagatatgatagatatggtggttatgatgatagatatggtcctccaagaggtggttatgatagatacggtccttcaagaggtggttacgatgatagatatggtcctccaagaggttacgatagatatgatagatatggtcctccaagaggttatgatagatatgaaagatatccaccaagagaatcatattctgctagaccagcatatactgcaagacaacaaacaaaaggttatgaagttttcattggtaatttaccattctctgcaacttggcaacaattaaaagatttatttagagaatttggacaaatagaaagagctgatattattgaaaattcttatggtagatctaaaggtatgggtactgtttatttcaccaatttagaagatgcagaaaatgcaattgctaagttaaatggttatgattgggatggtagaattattgatgttagaaaaagtaaatttccaagagatgaagatgcagttgttggtagtgaaaaaattattaaagcttctggtttgtccaaaaatactgattttacattaggtgtcacaggtgaaggtaacgaatcaaatattctttatgttggtaatttaccatgggaaactgcagaatctgatttatttgaattatttggatcagtttcaactgttgaaaaggcagagttacaatttggtcgtggtggtaatgcttctggtaatgctgttgttcaattccctgatgttgaaagtgctcaaaatgttattaaacaattagatggttatgaatatggtaacagaagattaaagattagctttgcaaattatccaactccagaaaaattagctgaattacatgaagaaattcaaaaaagtttaaatgaagaaaatgctgttggtcaagttaatgttgcatctgaaccaattcaaaatgatgaacaacaacctgctgctgaatttcaacaacctcaagaaaatcatgttgaagttgtagatgataatgaagatatgattgaggaataaacttttgttaaatcttaatatcctaatatcttatcttaaaaagccgtttatattgtttttcattactgttcttcttcctttataacttaagtgaaaccgaattttatgtatatttaccaaaattagaaaaaaaaatagtatcatctaaatttactggttatttatagtattttttaacacagttttaaactaaatctttttgactagtatataatatacaaaattatacagttaaaacttctaaaataaagcagtttaggtacgagagaataatattaatctttgaatttttatgaaggaattattaaaacatctccatattcatttgaaactaacgagttgaaagatggaacgatcttcacaacataatctatttttttgtttttttatttctttcaaatatgaagagttttgtaaaatcaccttatactaatatgaatatctatagttttctaagcagttgacgaaacgccgacaaattttttgaatgctttaaatcttgaatttttcattactgaaacttccacctcaccaggtgtttcaatactctccttaataaatttcaaaaatctattaccatattcataaggaggtacagcactaattgtttcccttttatgttttaaacttctgaaaaatgtttcaagttttttcaatgtactataatttgtcagacaatcaataattccaatataatatacaatatccatttcttccccattagaatcaattgcacgaatgccaccatccgtatcaaatatagtatttttatgagcaccaggaacattttgatgagttatcattgataatcttttaatattttcatctaaaatgtcatcagttttacttagataacgtaaacctaataataatgaataatccataatattcaatctttgtaataattttacatcactttgtaattgattctctaattgatcctttttcatttttgataaatgaattttacaattactttcaataaaattcaaatcttttaaacatgaaccttttgatcttttcgtttctgatgtttttcttccaaatgttgaacctttcaaatcataacaatctgaaatattcacggtattgggtaaaagattgttcataactaaaacatgaactttaactgtacctgttttagttgtcatttttaatctatgtaaaccataaaattgacaaagaagagtatttggatttttcttaacataataataataatctttcaaaattcttcttaaatgtttatgctctgatcgatgaattgttttaataataaattttctatcatttgaataataaaatgaagatccacttttacctgatgagcctacagcttttacaccaatttcatcatttaatgacattaaatagtcagcttggttaacattgaacatacttctcaaatctctgaaaacttctggtgcataatctttaaatttaaattcatacttggttggtggggcttcattattaccttgtctattaaaaattaatttagtttcttgagtaaattgatcatctgttattttactgggtattttagaacatcttgaaactgaaaatcttatacctgtaactaaatcataaactattgcataattttcatgtgactctgaaatattttcaccggggatattatataattcatcggctttcatcctactttttattcttgaactatttaggaatgatgaagttttagagactctcatccttttcggatgctccaaatcatttataagattatgaccaacttcaacagcattctcaatatcatgtctatgccttattagtgaaaggctactacggtgattatgatggtgatcatgacctgaggttgcagcaagttctgtcctctgataattatctggaattttaattgtatttatactttgaaatgtacgtctatttatatttttttccttatttgctggagttatggtatttgaatctgataatttatttggcaacgaagaagttttatgttgtcttttgaattctgaaagttcttcttcttcttccttggacattcttggaaatgtattatttttgataggtacatcatttttttcattgggaacatgttgaagagtttttgaattagctattggaactattgattcgacttcacttttcgtctttactacagttaatggatcaatatcagagatagcatcttgggtgttaacagtatgatttttcattggttcagcaagttgtctatatgaatgagttaaattattacctgtttgagtattttctccatctaattgatatatacttgtgttttccgatgtagtatttgataaatcttcagttataagaaccaaagaatcattatttggtaagacactaactttaaaattttgttcatcttcaggtattttttgaactagaatattttgattattgttactattatcttcgatgcttgtcattacagaatcttcacaatctaatgatgaaatgccttctgaagatgattttgatacagttgttggagatttttgagatatactttgatttatagtatttatgttatttatgttattattacttaaatctgattttgcttgaaaatgaagattttttattgattttgttgacttaagcatactgaaataatgtatgttctattaacccgattgactgtataattctacctttttttcctcctttgaaatattctattcttttaggacactataagtgattaaattgtataagatctcttctatttgaatgtaagatagatctcagaaagaactgaatttgaaagttaaataaatggtaaaaaaatatttgtgaaaaaagttccgacagaaaaacgacggtataacgggatgaaataaaagggaatttaaaattttgaattttacctttgatataaaattgtgaaagagaatgaatcaaccgtcaaaagtgatatgaatataggtgataaagaacaataacagacttatctaaaagagataacaatgaatgaagttatgaacccctaaaaaggaaaggcaaaagagaaagaaagaaagaaacaatattaattaataataataataatagaagtatctaataggaatctgctagaaaattgtcatcctcactggcccgctgtgggcaacttaaacgggaatgatggggcacttcaaatttcaaatttcaaatttcaaatttcaaatgtaaataaaatattggtggagtcgcgtcttataattggagctacatgtctctttctctgaatcttgattttgatcttgatcttttataaaatcacttcttcttctggaaaaaagtctctgttgggggttatgagtggtgttcagtgttctggtttgaagtatttgcttttgaaaacatcaccccttcaaaaatgtatgtttcatactcttagaagacagtgtaaagtcacagatcaggtcttgcgacacgtcagaaatcatcagttcaaataccaaattgatagatcacactccacagttcacggcaataccgatatgaaggatgaatttattatatcatcggatgaatttgataccataaaagtagttatgcccacgaaaaataacgaagaaatgaagaaaacggttgaatcatcagatatggtggaagatattttaatagaagatagaggttcaatcacctctgataactcattcacagatttttatcaatacataatagatacttacaaaacatatgcaaatacaaatgatggcaaatatatagttttgattcatgttggttcattctatgaattgtattttgaacaagctgataaattctccaatatgttaggtataacattaactaaaaagaatctgaaaagtggtccaatatctttctctgggttccccgataaaatgttagataaatatatggatataatatataaggctggttataaagcagtgatatgtgatcaagttttagatactgttacaaacaccattagcagacctgttgatcgaataatgacaccaggtattgtcgttgaagaatcttgtcgtgatttccatagaaataattatttaatggcaatatcactacctgaaactttaacaaatgatgtggaatcaaagaaagtaggtatatcatggtgtgatgttaacttgggtttattttacgtccttgaaactgaaatcacgcaactactctctacaattactagaataaatccttcagaaattcttatatccgatcctactaaaattgatcaattattgtcaggatcaatcttgccagaattggtagatttgaaatcttattacataacaaattttaagttaggtaccaaaagaaaggaattaaatgaatttctttggagatttgcagataatgataaattagtgggaacaacattagattcattaaagcaaaaggagaaaagctcaacatctttattacttcattaccttgaaacatgccttcctaatttcaaaacaagtttccaattaccttctagatcgttgcctaagactttaatgcaaatagactctagagctgctcaagatttagaacttttagaaactttacaatctcgtaaacgtgttggtgctttatcacatttaatagataaaacattaacaagtccaggtgcaagacttttaaatacgtggttacttgcaccatcaactgatatcaaagaaattaataaaaggcatgatatacttgaacttttcttaaaggatttttatttcattgaaaaattgaaacaattactcaagaaaacagctgatgttaataggattattagaagaatagaaaataatagagctgaaagatttgaatatcttgaattggctacaactataaacaccattgatgaaatttatcaattattgaaaaattcttaccctaaaaaatcattaaaaataattgaccatgtttttcaagaatttaattcctccactagaattcataaattgggtgaacagatattaaagacaatcgatgacaaagtgtcgtatttaaagcctaactcgaatagattggacggagaagttgttagagagttttgggaaattaaagagactgcttcaactccattgaaaaggctaagaaaacaatatgatgaacttttgatcaaatcaaaagcgttgaaagtaagtttacaaaatcaatttttggaagaaggctattcaggctctttgagattaataaaagatatgaaaagtttccaatatgttatagaattaagatcaactagcaaaatcattcctcaaataataaaaactttggatcttcaagttaaagaaagaacaaaatcagtaacaaaattacataactcagagtggtctgaaattggtgataatttaataagattagaatatgacataacacttgaagagaaaaaaataatggatttattgaatacaaaaatatcgaaactttataaagaactgaaaaaaatatcaccaattgttgaaattttagatgtaatgcaatcttttgcaatgctagcatcacaatataatctttcaaaacctgttatggatgaatcaactatgtttgatgttagtaatggtagacacatagttgtagaggaaggtttaaagaacagaattgatatgtgtaacttcactgtcaatgattgtaatattaaatcgtctgaagcttgggttataactggacctaatatgggtggtaaatctacatttttgagacaaaatgcattaattgctattttagctcaaattggttcttatgttcctgcagattatgcccgtattggaattattgataagatatttactagagttggatcatctgataatattttcaaacatcaatcaacattcatggttgaaatgaatgaaactgcaatcatcctaagagaagctacagagagatcattggttattgttgatgaattaggtagagggacttcaactaatgaaggtgtttccattgcttatgcatcattgttcagactactcactgttaacaaatcaaaggtattgtttgcaacacattttggtccagaattgatgcaattaattgaatcagataaaactgtatcagacacaatttcgttttacaggactagtttggtagatatcagtgatttggataaaaggtcaataaaaccaattgatcaaaagttaatctttgatcataaattaaaaagaggaataagttatcattcacatgctttagaaattgcagaattagcaggatttccaaatgatgttttgaagctggccgaaaataatttccaaaaattgactagcactgtctaataactttatagaaaaaaagtataattatagataatgaaaatttaatgacttattaatgataattagagaataaacattttagcaactcttatttaaaaaagaaaagtaaaaaagtaatggacgagaccggagtcgaaccgatgacctttcgcttgcaaggcgaacgcgctaccaactacgccacacgcccaattgttgttgtttttaagcaaaagtaatatagacgggtagcattatttagtcacgtgattttaaatttctaaaaaattatgtgtttttaacaaaaaatagaaaagtaccataaataattaatttttttagtaaaaaaatataaaaattacaagtgttttttagaagtattctcaatagagaattaaaaatctaactatatgagttaaaagtgtaaaatttagtttgtttgattatacattacttacacagttattcaatctatgaattttccaaaaataatgggattgattacttctctggatcatattcatcgtcctgatgcgattgtccattattgttttgattgtttatttggttcatagggttaattttatttacattattagtaagtgcagcagctaattgagctacaagaagagagttattttgatgttgtggtatggcttgtggtaaattaggactgtatgatgaattaaattgttgtggttgagcttgttgtggttgctgagtttgtggatatgctggattatatccttgactaaatgatgaattcatctgtgagtatccagcgttatattgattatatccttgttggttttgattatatccttgagtatattgattgaatccttggttataaggtgtattatattgttgattattgtattgagaattaaattgttgaggatattgctgtgtatattgttgtccaaattgtggaggataactataattgttaattgcagtattgttttgtgaatatgcttgcgattgttgttgcattagtcccataaattgttgcatcattgcaacagggttttgcgccggtatattttgaggaataaaagaggaaggatttggaatttgtgaagatatgttctgttgatgtggtttgtttgaaacttttttaggtagggatgttagtctggctttgacagacagtggaacatcactcgtaacagagttatcaaatttaggctttttatttatgtgattatcaatggagtcatttttggaagaaccatttgttttgtcattctctgaattcttggacttatttttcttcttctttttattctttttggacaaagcttccttctcatcatccgaaaactcttgttcttcttccggaatttcttcatcatgccaattacttgcatcagtacctttgaattgtctgatatgttgagtggaaagaaactcagcagatgattcaacgtaaaatattttacttccttttttgtctttgaaattttcagcttcttcactggtattaaaacgaattgtataaactggagattgaagacgccctatgacttcatacaacagaccaacaggagtacgatcttcaaagcaaaatatcgtaccttcgttcaaaacattgtattcagcactcatactagccttcaccaggacatttttatccactactccacttataaatccaatgtattggatttttgcgtcttcctcaattttgtaatcgtttggaattgaaggaactttgaagtctaaaatttcatttctagatacaatcggtgtattttcatctccttcgtttatctcatcttctaaatcattgtatttatcattgtcattattatcctcagattcagattcagaatcagatgaatccgaatcagaacttgagtcagagtcagagtaagaactagaacctgattctaattctttctcagatttagatacatcggattcatcataatcatcatcaccatctatattatcaccatcagattcttcatcagatgagtatttaaccactttgtcaacatcaaagatatccatgtcactagtttcatctctttcattagactgattttcttcttcattgtcttttttgtttgtatctgaatcactcttttgaatctcattatcagatttactaccctgtatttcatttgcaacaacatctgctttagatgattgatctgtagtgaaatcagttttcacatcatcatttacagtattttctgatgtattgatgtcattttgcataatatcatcctttgatatttccttaatttcacccatttaaaatttcagtaaatagtatatcaggtattcctgttcactctaaactcaattaattctataaattgttaattatctagttatgaagatctaatatgcaaaatcattaaagaaatttgttcaaattttgtaacatgaaaaaatttccagcggatataagaagacatatttttttatagtaacatcgttaactcagtgactaacttgttctgctctagttctatttgagtactattgcagttttatttaacatccacatatacatattcagaagggaaaattacaactgtcattaagatatgatatctgatatcatattagaaggcttaaatgcccccaatgcatctaggataatctcatcccttatattcctcgaatcatcatcggagaatagcatttgcttgaacaatttttctaaaagtatcacctcaagtatgaagttagaattgatccaaaatacagataaaacaggaaacaagtctacaggctttgtactcaaagtgccttattgttttgataggattatattaaatcttgaaaataatgtatcactaaccaatgttagatgtatgttaagatcagacaggaatgccacatcattattccaagtgaattcacatgagattaagttaccattgaatgatcaattttctgggctcatagagttatcagtgtttgacaacgataaaaatattttaacttttaaattctatcgcccaccaccagccgataatttcaataaagatgtaagcacaagaagccatgaaagacacagcgaatccatcgatacccacaaccaagaaactaaaagaagctcatcaggaatagaaaaaaaaatcaatccatttccaattcctatgcctgatggcccacttttcagggaagcaattagtatttatgaacaaatggcaccaataattcttcgaaatttacaatcaaatattgacaaaatgaataatttggatcaaaaaatcaaaggcttggaacattcaagaaataatttaatggattctttaaaagatttccgaaaaggctttatgccactagtttcaaaacaagatttagtttactcaaaatttgaatcttcaaatacaaaatcgacagaaaatgatttgacatacatgtttttaaaagctttgaaagagtcaacatccgagacaaaaattgatttttcagcattgaaatctttacagaactttggagcatctaaaaggaattttgaagaagaaagtaaaagatactacgattggctttctaagctcatgagctcaggaaaatccaaggatgaaaaacttttaaccaagatgaaaaatttcaccatagttcaaatggagtatttcaattatttatatgatactgttacaccaatgttattatcattggtaaagccaaattctcaacttagtaaagactattggaaaaatagacctcttagagatcgtgccatagtatcaatttcaaaatgtaagaccatggacgaattcagtattttgatgaagaacttttcaaaaattactcctactaaaaataccttattgctaattgatccaaactcatcctataaagtagattcttatgatactccaatcaaaacaggtcttttatttgtttttggtggtcagggaaagtcagggtggcacaagcaatggatcgtattttgcaatggaaaactttttgagtatatggattggagaaaaggtgctgcacttagaaatgctccaattgatatttcactatgtaatatcaaactgctagactctaatgatacctctaaaaacgtcgatattggttccaggaaaaactgttttagagtcattaactcaaaaggtacagaacacgtatttcaagcctttacaactgctgatgctaatgattggataaactcattaacagagaaaggtcaaatgttggcttttaagaaggatgttcacaaccaaagatccccaaacgatgaaaataaagattacaacagaattgcacaattatcaaattccacaacaagtttactgaattcccctagagttagacgtgtatcatcggtctctttatcattgctaaatattgttcgaatggcagatcaatcaaatacagtatgcgctgattgtggatcaactgaaaaagttgaatggatatcattgaacttgctggttgtgttctgtattaattgctcttcagcacatagatctttaggtacatcagtgtcaaaggttagaagtttaacattggatagctttgcagatgagaaccgtgtattggttcataatatcaataatgcaagatgtaacggagtttatgaagcaagtatgccatctaatattaaagcaaagccagattccgaatacgaaacaagactagaatttattactagaaagtatgttaaaagggaatttataacattagagaccaaaaagaatgcatctcgtacgctgatacaaggaatgagagatgatgatgttagtaaagtgttagaaggaattgcaggtggtgctaacgtaaatacaaagtttccatattcacctaaggcagattcaagagctagtataacttcattatccaaattagatcctaataatacgattgagatatcatttttagaatatgctttattacatcctagtattcttgatggtgaagaagtttttgacattgcagaattgttaacattgaacggatgcgatgcgggaacgcaagtaagaagtggttcacttgttgatgaaaaagcacgtaagtggtggcaagatagaattgataaaatgaactgtgctacatcttcaacaccatccaaacaaatgtcttcaacacctccattaacgctgaaaaataattatacttccaactcaagaaccagtatgtcaggtacaacaagaccatctatattaaccatgggaaatcacgggaaatttggctctaggtccaaattaaaaaatccaaaagaaagttttaatctgtttaaaaagaagatgaaaaacctggatcaataactgaaatagaataatgtaaactaaatgattttgtctttttgagttaataactaatattccaatatatattactaatacctaatatttaatacctaataataattcataattaatcatgaatttttaacttttttaatatctatctatctattataaaattgtataaataaatcatagtttaattatagttcacacgatgaaacttttgacttatctatgacttgctcgacaagacatgattttttgttatctctacgatttaactatttcttttatcttttgatttgatccccattacagttagttcaataaaccgaaactcccaatttttatatgaaaacaataataataggattaacaggtgcatcaagttccggaaaatctacaattgcatgcattttatcaacgattttaccaaattgtcaaattattcatgaagatgattttttcaaacctgaatcagatgtaccatacgatgaatcaagaaaagatagagattgggattgtcccgatgcaatagattttgtcaaactgaaacatacaatcagaactttaaaagagccatcacagtatgacagtacgatagagtcaattgtggcagattcaggaaatggttactatgattacgttttgaagtcaacagaacctccaagaaatgatgcaagttttcaaaccgatgaaactgtcatcctcaaagcaaagaaaagtgtaagtgagatacttgatagtaaacacaaaaatgattatagaataatactattagatggattcttgctgttacatgatgaagagttactggaactttttgacttcactttatttttcaaaacaaactatcaatcgttgaaagatcgtcgtgaaaagagacattatacagtaggcgagtctttatgggtggatccaccagggtattttgatcaatttgtatggccaggatattacatttatcataaagacagatttacaaatgatgatgaaaatgttgtaaagttaacaggcggtgttttaaaatccgacttcaaagataagtacaaagttttcgagttttccaatcaagataattgtgatgcaaataggttgatacaggatgtaatatctgttgtaacagaagaactttgataaaaattgtagaagagtcaattatgaaacttatctatttttagattacttaaaaatgcttatataaatgtacacgattcacattacttttgataagtgaactctatttcttggatttcttagattttcctgatttaggcttttccttagcaagtgctttcatttcactactataaatatcatcagctgtttcagttggctttctcttagtacccttctttaaacttacagtacctttattcttaattgcacgatcaattgattttttatcagaagaccaatcacctacatctgttatcttatatttatccaaattcaagttattaatcaattctttttgtttttcttttctttctctgatagcttccaatgcttcagcacctgcagattcaagatcttcctctaattctctttccatttgttcaacatcatttatagtttcaacttcttcaccatttaactctctcatttcattatctataatttctggcagatcttcagcaattgactctttaactaaagatctaaaatattgtgagactttacgaataattttagagaacattgcaagtgattgattagttgcaatttttaattcagctgagattgaatctaattccttatgttgtaaaccgactgctaataaaatagcactttgaacatgtgataatgatatttcttctcttgcttgtccattaaagtattgatatgcaatatatggtaataaatcaagaataacatgataatcaatcaaattattagaatatgattcaagacgttttaagtcaaatggtgataaaactttatctaaatcttccttagtaaatttggtcatctcatcagtattaaccttacatgattctaaaacactcaatgcttgtattgatgggaaagttgaaaatccataacctaataaattaataaatctcttatggaaatcagttgcaaatgcatgtaaccatttagcatcacgaccttctaaagtttttaacataacacatgtatgttcaccagttaaatcatttttagtttgtcttaaataaactggaacataattaccatgacgccagaatttatttaattgttgtgttaaaccatatgaaacacctaaataatgtaaatagtatggtgatttatgagctaaattaacaaataatggaggtaatttatcatctttacgtggtttaatttcatcacgtaaagaaatttcggtattttctaattcagcatctgttaatctattaattgagaattcatcaagtgaagataatgatttattattttcttctaatgaagcaaatttaccttcgaaataatcagttaataattccattgctcttgaaccataacccatattagtataatctggatgagttgcaatacgaacaattctagcacctgataaacttgcaaaatcatcatcttggaattgttgagagattaaccaaggaattaaatcaccaccggctctaataccacgacttaaattactacgaatactatcttttgaaatttcaccttctaatgcaatttgaataacacataatggagttggaattgaagcatccttaccaacatcaggaccgaaaagtgcatataattgatgagctggagcatctgacattaattgtaaatcatttggagagtttttataatgagaggagacaaatagtgccatcatacgttgaaggaaagcttcagagacagggtcataagagaataaagtatcacgattgatataaaataatgaacattctgaaggatgaggacaaccacgagatgcatacttagtatgttttgttaattttgcatcgagacataataatttatttaaccaagattcaactggatcacctggagcatatctaattggttcatccaatgtaacttcaattaatgaacgagatgaaatatgaagagattcgatatctttagagccatttgattcatcacgtgaaataacttgagtttgagtattatctttaataatatttttagattgatctcttaattgttgaattaatttcaatgaaagggaacgaccagtaccttcataaccattaatagttgaggccatgaaaactaaataaggacctaaaagttttttgacaacaggtaaaggaattgcagcagcttcatcaataattaacaattctgcttgacctaaaacttgactatcagttggtgagatatattgaattgtttgtctatgacctaaacgtttaacatcaactctaacaattgccttattgaatgaagggttagtagattgaataatatcataatcttggtgttcaacataacccatagcatcaaaacctttaaagataaattcaaataaagttttcaaattttctggggatggggaagtcacaaaaatatttgaataatcttgtgcaatagcagcagaaatagcaatacctaaggaagcagatttaccacgacctctaccagcagttaatgcaacagttgaattaagagttttttctgcaattgcatcaataaatcttaaaattgcttcagcttgattaacagttttagctaaagaaactaatgaaccagcaggttgagtatcagttaaactttctttaatatcctttaattcttgttcttttggagtaatatcttcatcatcctttggaggtaaacgtttaacatgtcttgcaccagaaattggtaaaacatttaattgatcatcagcaactaaacaatttttacaatcagccaaagataataagaaacgttcattaaaacgagaaacaacatcattatgagcttcagttctatatcttgaatgaacatccattgtcattgtatataattgttttaaagatttcattgatttaagtaacataacgaccaaaccaccaccttcaacagtttcaattgtacgtgccattaaatttggtgttaaaccttcaaaatcttgtaaaacaagcataccataggtattacctaaaatattttcagtttccttataataaacatatctaatttgttgatttgtaaggaaagcttcaaaaggatctaaatcatttgcttcccttgtaccacgtttaacatcttttttaatttttttctctctattaattctatttgatgtaaaacctaaaagttttttcttataagcccaaagaattgatttattcatttttaaatttgcattcatcattaaataatgtaaatttggaatttgatttcttgatttatcaccaactaaaataatgaaagatctttctcttgtatcaacaccattacgaattaatgatgggatacgagaatcaagaactttctttttggtagtattgttgatattagtagccattcttaaaaaggaaaagagaactcaattacttatttgattcctgggtttctaagatctattcaatcaatcaatcgaagtaaaatttaaaaaattatcacttgaaaattatttatttaaagatctttctaaaaaattttttttttcatgtagtaatagtagtatagtagtagttaaaatattatactcaatattacgtaatttttaaatttttcaaaagtcacgtgataaagtttaaagtttgcgacgatgggtcgacaaaaagataatttttttgagaccctcctttgtatcgatgctgtcaaattatttaataagggagaattcacatgttataagtgcatgattataatggagtaacgtaaggatgtttttatactattttgttatagtttctacatcacttctacaagaataatatcaattattccgtgaagatcagttggaaacacatctgaaatcacgaattacaacttttttttatttactttagaatgaaaggcggcgatttaaacttgaatatggcatcttctagtttatctagtaatgtttcatcatctttaaatttaaattcatcttcatcctcttcttcttctgctaatatgaatatttccaataataacaataaccaatcctcatcttctaacatgaaaaaaactggctcaagaaatagaagttcaagaaaacgtaataacaacaaatctacttcatcatcatctaataaagatactaaggaatcaaaaaatagtggtaataataaacaaagacttcaattaaatgatgattcccaagatattatgtctttaattaaatcatctaaaaaggcagttgatataagtcatttagttaattatacttatagttatgatgatatcccttctcaaagaccaaaatcttcagataaatcttcaaatagaaaaaagcaatctaaatcatcatcttctcaaatccatttacatggtatgagttatattaatgccaattataaatttattttaaataatcaaggtgattataaatctcaattattagatccaaatttacctttaagtgttaatagtatttcacgtgtcgttgttaaacaaaatgattatcattgtccaatctgtttaggggatgaatttgttgctccaagaatgactaaatgtggccatattttctgttatccttgtattatttcaatgtttgataatgttaaaaatgataaaaagaaaacaactttaggtaatatgcataaccctgaaatttcatgtcctctatgttctgaagttttaaaagaaggtttcattctattacctgtgttgattgaaactgttaaagaaaatgaatccttgattaactcaaagaatttttatgatttatctttgatgtttagaaataatgccaaaatctattctcaaccagtatcaaatttttatcaatttaaaggatttaaaggaactataccttggattagtcatggctgtactcccttagattttaaacaattttcaccatatgtctctaattcaaggttaatattgtgtgatattcaatttttaatttcatgttatgaaaaagaagtggatgatttaatgactcaacaattaatagatatggaagtttatggtgatgcaggtccattctataatatagcaatagacagagttcaaaagagaatcaatgaacttaatgatttatatggatcaatggaaaagcctataagaggaccaaataaaatcgacccttccaatttagattctcaattttctaatatgtcattaaatgatgttcaattaccttcatataatgaaggattctattactatgaatgtgatgttaatactcgtattcattattttttatctccattagacactcatgttattaataaattattcaatttacctgaatcaaaacttgatgaaaatgataaatcaggtataaatttacaacaatatgattacaatccagcttataatttaccattatcattaaaattatttgttgaaaatatcaactcggatgaaaataaagtaacacctgagttggtaataaaatatccatttctgggtaatttaccatatggagctgaaattggatttcttgaaattgattggacaaaatttgatagttcatttattccaattgatgaatctttatatgataaaatgaccggcaactcctcagatagttcacttgataaatatccaattcaaatcccatatcacttgaaaaagaaattatacaatagaaccaccaacattaaaaataaaagagttaatgaagaaagagctcgtgtacgtggtgaattaaggagagaaaaggaaacattagaaatatttaccagaaaggaagattatgaagaagaggaagatgaaaattttgtttttattaatcctgataaatggagtaaggctaatccaaatcatatacatttaattgatgataagccagttttaaaaggtgtttcaaataattttaatgtattagccaatctaggaaatgataatgatttaagtaatgattcacgtgaatcaatcagtgctggtggcagtgctggtaatagatcaagttctaatcctccaccaatgactactaaaacatcagtttggggaactaaagttccagttgtaattgatctagaagaagaagcattacgtgaggaagaaacccgtcaaattgatgaactgattaaaaaagttaaagcagaagcaatggaaagtaatactaatggtaaaggaaagaaaggtaagaagggaagacgtggtaaaatggttcctttaccactttaatccactaaacttattttgagtttataacttatcagtatgtttttgacatgtttatgtaattatgatttttttagaaataatttttcacgataatactctaagtttcattataactattcagacttttttctttatctacacaacttaacatgcttagtcgatatagcaaaagcttaacgaagttatcctctgtatataaacatgaaatccattacataaaacctcaaactttgggtccaaatatacgattttattcaacgaaaaaatctaatcgtaaaaacaaaaaaatagatactgaaacatcatttatagctgaatctgatgaatacatacttaaagaactcaaaaaggaaatcaaacagttcaagtacaaaaaccaacaaattcctcagatcattgcacaatttaaagatattcttgcattatatgacttggaatttgttcaatgtccaatatcattagatttagacatccaagctgaaaaaacgatacatttgaggaagaatagtgtggaatgtattagaattgacttacttatagattttaagactcaaatagatgattcaagggaaattcaggtagttctaactaatgatagtgaaattgcaatttacatgatgggaagttttacaaaagcaaatggattttgttttgattcttgtatggttattgataaaaacgggaaagaaataagagatgcaatttgtaacggtaatcccgagattttcaaatcattaaacaatcattatcttaaaccaatgaatataagtgatgaaagagttttacaatttttatcgattgatgaaactgatcctgatgccattattccagaatttgatgacagtagaatgtttttagaagcaatggttaattacacagttgttaaaatgttagatattcaaaagagtaatgttgaaggtacaaaattacgttcaattatttggatgttaggtacttattgtgaaaatgcattatttggtgattggttagaaaaacttagtaaatttatagaaaagaagtaattgaaatagaaatttgatttatagaatggaaatattggacaatgttaacatgtaattgagtatgcatatcaagcaccctgtagcaatttgactgtaagaacgtcataccatactaaatatcttatgtgattacgtaataaagttgtatatttgtgatttactttctgatgcataatgaagacagcattgcatccactttatatcttctttagatagattggaaaacaatgccacaaaaggagaagtccgacattgttaaaggcccgtttagaaaatttgtgcatttaaacacaaagatctttgaaagtaggttttcaagtgataaactttcatcaattgggatccttactttatgtctcattcggatgtataattataaattaccagatgtaattttaccatctgaaatagaattaattgattcagttaatgcatacaatagtggtgcatatttggaaacggaaaatcctccattagttggattattattcactgcaatcagtcatgttttaggcaatgatgttgttaaattaagattggtgaatgaactatttggactgatgtcattcctattgttaaataaattactgaaatataatggtgtttcttcaatagtttcaaattttggaatgattatgatccttttagaaaattcattattcacacaattccaaattttaacaactgatgcaacttatttaatgtttattacatttttcattgcaaataataagttatctaaattaaaggtaattaccaataaatcatggtttactcagactttactggcatcaattggtttaggattagcattcagtagtcattggtctggcatattccttttgttttactcttttgcctcatgtattcttgaattatggtataattccgccgatcttactatttcaattaggagaacatggtacgtattttacactaaattagcatgttatatgataataccaatcaccatttatttatctacgtactatgcaaattttagtttactaaccagtgctggagaatcatataatcaattatcaccagagtttcaatattcactacaaaacaatcatttaaataatacttttcttaatgttaaatttggatcaagtataatgttacgtcattatcagaccggtaaatacttacattctcatccagattattataccggttcaggtcgtcaacaagtcacattattagataattataatgacggaagtaacatttttgaaattcttacaattaggggagttgacaaaaatttatttgattataatcgtagtattggagtcccatggagagttgaattacttcacgttgacacaaactcttccttagtcattgatggagaccataaaccaccaatttcagatcaagaatataataaattagttacaacagatacaaattatgaagatatatcagaagaaaatcaaaaaagtaaacaacaatttcaaattaaaatttcaggtaaatattgtaagactgatgaaagtaaaagatcacttcaagttgttaattctgtttttcaaatatataatgaacgtgaatcttgctatttacttggaaccccactggtattaagtgaaggattttcaactggacaaaatgaagtaatatgtatcactgaaccaaactatgaatcatcattatggtacattgattggaacactaacggaaactttcctgaggatgatgaaagaatctctttgaaagaatatacattttgggataaacttagtgaagttttgatgagaaagaccaaaaagttgtttgttggatttcttggttacgatgttgaaacacatgacaatagtattaaaagctggatgtttatatcaaagggattcacccattacatgggcgagaacggtgcagtttatttattaggtaattttatcacataccatttaataattgcatctattatcatatatggacttttgacaatttatgaattttgtaccttcagtccatttaatgaaaatgaaattaatgaggttaactacagatatgagtttgaaggatttgattatttggtaggatatttaatgatgttaattccaatgacatttgtcaagattgaacttcatttattcaattatttaccatctttaatttttggtattcttttcactatacaaacgtatcaatggttatttgaaaaatccaagtatttgaccattgctataggtattattgtcattccattcatcatcttggcatattataagttcttaccagtcatgattatgggagaatggacatttgaaaagtgtagcaagttaatgatatcaccatcatgggacagtgaagtgtgcgaagtgtataactgagatgcctcttatagaaacgttatgtaaatatttagaagaaaataataataataatattataactttttgctcccctttttttcttcttcctttatattaaccaaggattgtatatctacaatctagtcattgcttgttgtatttcttaaaatggttaatagtaaaagtatcattagtaactataagtttttagattgtattggacgtgggaattttggagatgtttatcaaggtgttgatttgagaagtaaaaaagttgtagctatcaaagcaattaaccttgaacaaagtgacgatgatattcccgtattattacaggagattaatttattaagaggaatgagacatgaaaatatcactaattggtacgatacgatagttgttgatgttaccatgtttattattattgagtattgtagtaagggtagttgtgcagatttattaaaatataatccgaaaggacttgaagaaaatatcgtttcgtatattttacaaggagttttgaaaggtttagtatatttacatgataataatattattcatcgtgatattaaagctgccaatattcttatatctgatcataatattataaagcttgcagattttggtgtaagtggagaaaaaattggagaaagtggaagaaagacatttgttggaacaccatattggatggcacctgaaataattagggaccgtaaatatttgagggaagatttttccaaattagaaagaagattaatagagaatggattaggtaggagaacattatacagaatgtggaataagaagaacaaaaagtatcttggagttccaattgagaagatgaaaattgaagatgaagatgaagatgttgaatatgatgaaaaagttgatatttggtcattaggtgttacaatgattgaattatatagtggtaaagtaccacattctgagaaggaaccaatgaaggcaatatttgatataccacaaagagaaccacctaaagttaacggaggatattatatgaaagagtttggattagcatgtttatgtaaggatccatacatgagatcatcagctaaggaattacttaaatttaaatttattagtaagaacaaagtgaaaagtttggagttagataaagtgctgaatcatacaggtaaaagaaggaagccaaaatttgatattagtttccaaagtattaattatggtccttgtaaagattgggaggttaaagagttttacgaagataatttaaagggagtgaaaactgacattgaaaaatctaaaaaagaagttttagatattgatttagaagaggatactgatgtagattctgacgattttgataattctcaagaagccaatgaagaaaacgaagttattgctctatacagtccatcagatgaatcaatgatagacacattggccaattcattctttgataatcatgccaatatcaatcctacagcaaatacctctcctctgatagtgacagtatcgagtgccaagatatcagcagtgatgaaacgactaagagatcatctcaatggtagcaactgtaacaacagtgtaagtataaagctgagccaccttgaatatttattaagagacctgcgccacaggggaaataacagtaacggaaatgagaatggcgaagctatagtgaaagacgtggcgcaggttttagaagtaatgacacagttgatctcgggacaggctttggctgtataaaggagaaggttcttatctcttcttttatatcatcaatgatcttcttctaacgtatattattttgtcctgttaattaactttgttatagttataaaggtttgagtgtataagtgtttgctatatactttatttatacttcaactatctatttcttactattcttatctagtgaattctatcctaataatcaataatataactctattcatatcatgcatgctcgtgactggctattagcattcatcggtatctttttaccatttgttcctgttgctcttaagagaggtatctgttcagcagatttttggataaatattgcactttgtttactaggttttataccggctttaattcattgttggtatattatttcatgttatcctcatgattcttcttcaagatatcaaggtgttacattacctggaagggaatcaaattatggttcagtagtttaaatttaatataatttaatttaatttaatttattttagtttctatttaccatttctaataaattgtatatttccaaaaaaaattatccttatctattgaaaatgcttgttttgaaaatgtacatacacaatacggctcatctccttttacatgcacaagtttgctgtaaacagagggaagattgtactctcttcagagattacgaccaaccaaacaacacatgacaaccccttaccatctacaactcaaattcatctaccaccacaatcttcaccacttaaaataaatctttcattcttgatagataagatactcatatgtgaatccaatactccgaatatacagaattggctctttgcacttttatctaattctaaaatatggtctcatcttcaatatacagaatcctttactaaacttccatcatcatttacaatttctttgactgatactttatttgatggaaatatattcacagatataataaatagcaaatttgaacaggaaaaacttaattctgttaatattgaaacaatatctgaaatatcaatacgaattaatattaattcaatatcagatttagataatttattacctgatttaaattatatcctatttcaaacatttattaaacttgaatcaaaatatccattgatatttaattatatatcacgtaaatcatatcaatcatcaatttcatcaattccatttattgtttcaacatttcataaatcagaggaaactcaattatcttatcaaagaagtttcattattggattatttaaatcacttaataattcaccttcatatattgatcatatatcaaattctcactatagcactgtgaagagatcattagaaaataaggatagttttacattatcatggttcgttttagattcatcacttcctacccagatttaatataaacattaaaatgaaaagtggtaataaatataaccaatcttttaaacttacccaaaacttgatcattttaatagctaaaattatatgataggaaattgttactatcatcaaaaacttaatattttcaataaatggtatatgtaatttaactatatacaccatattataagtaaatacaactggtgcaaataatgttatacatgcacatgcactgaataatgcattaataccctttctataatatggtaaacttatgaatgctgaatttaatataactaatactatcaaataaattctgaaaatattcttactaagtttttcattacttgtattattaattataatttcatcatcttcatcactactactttcgacatatccatacttcttctttgaaattttccttaatcttggcattgtcgtaatgaaaagaagattcaatgtctgtaatgcatgaatttccgattgcatgaaatttcgtacacgtaaaaaaaatattccacctaccaaattcttacatctttttattgattactctttctttaggacacaatcaatgggttatgattctacatacatgccactattatagatacttcatcatactctttatttattactttcatgtacattgttttattttttttccataccaagatcgatctcttaaacaactcaatttaatcaatatcatttgaaatttcgttcaattgtgattacatgaaaaggtacatgatacaagacccttctctgaaaaagagggaacctcttcatcgtgtaagagcatccataattcaatcactacagattatttttattaactagtttcatgaaataccattgcacccatactataccctatttgataattactaacaacactagttattatccaagggtataggatttttatcatctacttcactatacccccccctgcgacctacttcagaacacccctaatattatcaattaagtctcataaatgtattacatatttatattcgtatagaacgtgatgttatcattttcttgcgtgaggaatgatatttggaactaacaaaaggagttaagttattactcaaactggtacccgtcatcgaagttcaggctctacgaatatttaaagacatgtataataaagggcgtgattttttcaaatagttcagaaaactttacatttctaaagtttttcccttggttcatgatattataattagtattatcaaatgtgtgattttcgaatataatggtttgtgtgttatgatctttttgggatgtgaattgaacaaaattttaaattgataattgattggacatatggagtattggaaatatttataataacataatatacatgaaatttatttaatttaatgagagagtaggtcaaaaggataccaaaaatgatgataataataatgactatttggattacatacttttttctaataattttgaaatttcaaattgtttgatgataatgaaattaggactatcccatgtgttgaagtacgcactgagtaggatatgatcaatgaaattatttcatgtcgaaaccattaatatgactcaaatatcgaaatttctcttatgtatgaaaatcttattgtttgaatgactattattattatcaatatttttgattccgaaaaaaaaagcaattttttttacttttgattgaaattttgttaagttctatataagtgaattacagagatagatgtgatcttaatagagagaggttggactgaataagtgcagttgatgaagaaccataaccctgtgttctctattctattaaagtacgtataaaataccaatatcaagttaaaataccggaataaaataaatactaacaaaataaaatacatgcaatctcttatctaacatcaaactcggttaaaagcggcaacaagcattttttcaagggaagtcaacaaagtttccgcactggtttttctttttttcaattttcactgagatctccagtgtgtgtcatagacatttttggaaattgtatttaagagcagtaagtattccactgataaatttattgtcattactccacagttttcattgcttttaatttaatcttttgatttgatctttgatttgatttatattttatcgacaacaacaacaacaacttctcataatggtcaaggacttatcacatcttttatcagatcaatcaaagggtagacaaccttcccctcttaaatctgctttcaaatattatggtaaagacgatatcgtttttcttggtggtggtttaccaatggcagattatttcccttgggaaaaaattgttgcttattcacctgaaccaccttttgaagatggtattggtgctcaaccttcagttactggtaaatctgttgtctctgaagttcataaacataaagttgaagaatttgatattccattagctagatcgttacaatatggtaacactcaaggtaatcaagaacttgttcaatttttaaaagatcatactgaaatgattcataatgttccatattctgaatgggatttatgtttaacaattggtaatactcaatcttgggaagcttgtattagaactttttgtaatcctggtgatgcaatccttgttgaagaatttactttcccatcagctgttgaaactgctagaaatttaaatgttgaatttgttccagttaaaatggatgcttatggtattatcccatctgcattagatgaattattagcaaattgggattcttcaaaaccaattccaaaattattatacagtatttgtactggtcaaaatccaactggttcttcattaaatgaagaaagaagaagggaaatttattcaattgcatgtaagtatgattttattattattgaagatgaaccatattattttcttcaaatgaatgaatatgaaactggtaaaaaaactgaattaaaggaacaaacccacgaagaatttttaaatgcattagtaaaatcatttatttcaatggatgttgaaggtagagttttacgtttagattcattttcaaaagttttagcaccaggttcaagaattggttggattgttggtcaatctgcacttttagaaagatttattcgtttacatgaagtttcaattcaagcaccttcaggtttttcacaatcaattgttcaagctttattaggtagatggggtcaaagtggttatgttgattggttaattgctcttagaaaagaatataccattaagagagattttacaattcaagcattagaaaaatatatgccaactgaagttgtatcttggactccaccaattgcaggtatgttctttacaattgttttagatgctgcaaaacatccagaatttaaaactaaatataacagtgatccattagaagttgaaaatgctgtctatgaacatggattgaaggatggttgcttaatgattccaggctcttggtttaaagctccaaatgttccaaaaactaatgagacaactttcttctacagaggtacatacgctgctgttccattagaaactttaggtgttggtttagaaagatttgcaaatgctgttaaagcagaattcggtttataaatctagaataaataatattagaaaataattagaacttaagtaacatttttttgtataaccattatttgaatagaaatcctgttactttatttacattttttttatttattaattagaagaagtttttaatttttatccagaaaaaaatctacacataagttatattattaaatttaattaaaatattaatactagatttagatttgagtaacctttaaagatggtggtaatgcttgaacaagcttctttgccttaccttcatcattaacaattaaagtgtataagttcttggtacctctgaccttaaatttagtttgtttaactttcttaccgttagctttgacaactgaattggtcttgatggttgcagtcttaacatcggatcttcttgctaattcaacgaattgcttgatatcggtaatttctctctatatttaaaaaaaggacattgtagggggatatgtatatgttagtatattgttcatttagttttaacattaaatttctctattaattcttgtacttattccatttattgtagaaattcattattttgtcattaaaacatgagttttcaatatttctaataatttcaataagtgacatgatagattattcatttgagtatagtatatgatacgtacagccattgtatataagtgaactcggttgtttcaaatgaaaggattttcaaagaatctccaaaaaattgaaacaaattttcagtaaatttcattaaaattgaataaaaaatgaatattttctctcatagtaagagattacctaccctttctctctccctctaaggctgagagcgatattctcattttttatttttttactatggtaagaaatcttatagtgcgtgaaaaaaatagattgggtaaaaagggttggatagaccttaatgccggcacgtgattgtagactactaataaactataagtacctgctacatgaattttaagtgtatcttgggctttttgtggaaatcatcaagaacatcctttctatatatgttcaagaagagaagagtcaaaggaagtggagagaaaagaactcgtgatgatgttatagaagataatgatgttgaaatcaatataaaatcagttaagaaagataattcacttgattccacaaatattgataaatcaaacactgaaacaagttcggacaaggaagataaatcaaatgaatcaaacatcgaaacggaaaaagatatttttaaaccagatacaatgattgatgaacttcatcagaaattaaaagaaaatgaaaagttattaagtggatcaaaagaaattcaaaaaaaagatgcagatggcaataaactatatacgggaatgatttcaacaaaatcgaaaaaggaagttttagttaagcctgttagtagtcatgtgaaacaaagttttgtagttgattatcaacgtgatgtttgtaaagatttcttgaaattagggtattgtggttttggtgatacttgtaagtttttacattatagagaagaatttcaacctaatgagaaagagcatagtaatgaatgggaaatggcagctaagaaaaagagaagattctgattttgattttaattattattaacactaattcacacatatatggtttatattaagttatttttacatatttttacatttaatcaaggtatcatttagggaacaccaactatcaattattactttcttaacatttttatcattttgaccctttttaactgtgttcatgtttgattcattaatcaaattatttgttaagatttttaatattctatcattaccacaaatgatttttaattgatcgtttattattctttcatcatttattttttcaatataccattcatttaatacctcgatccaacaatctaacattatatcatatgtatagatatatttcacactattgttcctcatttcagttgtttcaccatcttgatcttttaatgtatcattatctaaagaatttattaataaaattaatggagtaccatccccattcattagtattgaatcaattataacattctcaacataaattttcctcttaatttcattagtcttaacgatagttgtcaaatgagtattaaccaatggtgctaaactaataccttctataattgacttaccactaaggaacgaaccattgataacttgaaatttccaagaataaattaaactattggagcagatacacataatgtattctttattacaaattaatttaacaacattcgaacctaattcaatagacccacataattgtcttccagttgttgaatatattaataaagtacctgtatctgtagacatacaccaatatgaaagatcattcattgatgattcttctaaacatgtaattttcttattgatgaataattgccatttctctaaatttgaatttatatttcttgtatttatagtggaaatagaattaaattcattccaagtattatcaaaatcaacttcacctctacttaaatatttgtaatgattttcgaattcaaatctaacttcaacaatctgttcaccattatcctgtaacaatttattttcaatgagtatattagaatttgattgcttctctccaaatatagttctagatgaaacaaccgaatctttcatccaaccaggatactgtactcttgaaactctattataatctaatgatttattattattcccaccaccatttgatgcgttattagacctacgattgaatgtacctgatgatggtcttgatttactagttgttgaaccattagcgttattattttgatgatggttattattattatcagcaatataatcaactgaatctgtcgaactctcaagttcagatacatcattttcaagattagttctcattgatgaaataaatgtagttaatccatttttaggtaagggtggatatggaactgacattattttatttagttttgatcttttacgtgattgtaatgttgataatgtcgatggtttcgttattggtttattaatagtttcaacagttgatgatgttgctaatgatggtactgatattaacattggtgcaattctctttttacctgattttgtaattgtaatattctgtgatttagctgataattcattaactttaacaggttgaatagtttgttcaattggttttgattgaggtaccggcatttgtttatttggatgttttttagatcttggaattaaaacattcattacctttgaatgatcttgtgaaacatttaatgaagaattaacatctttttcattcattaaattcttcaatcgatcagattctgttttatttaataaaaattgtttattaatatttgtatttttttcagcaatttcctctaattttaattgttcaacactttcagggaagaataaatcagtatctttaccataacgtattaaaattttactattttcctcaattggtacaactttacccaattcactttcatcaaaataaactgataaaactacaccatctaatccacaaagaaaaacatttaaaccatttgaattccatgaaacatcggtaattgatttagctgaaatttcagttgtaacacaaagaggagttggacatgatgaactccaaattgctaaagttttatcctgacctgcagttattaaaacagtttctgaatttttatttgaatcaacattatagagtcttggactaaatgaacaaacttctgaaggtaaacgatgaccaattaaacttaaatcactttcccaagtaccacgttttataacaacatttgcattaataccttcatttgtaccatttggagctgcaatatataaaccatcaggactccaagaacatcttctaaaataagtagttaatggagctttcttaaaaggtttactaataacattttcaattacaaattccatatcattaccattaccatcaacattaacaccacgtctaaatctgaaaattctcattgttctatcatctgaacaagttgtaaaatatttaccagctggatcaaatacaacacctttaacatgactttgatgaatatcaaattttttaattttttcaaatgttaaaccattccaaacaataattgatctatctaatccaactgtaactaaaattgaaccatcaggtgcccaagccatatcttgaacatcattatcatgagcaactaatcttttcctaactgtccaatgttctaaatcaatatcatcaccatctccattaataccattaaattcattgttaatattattatttctatgagatttcattattttggtcttttcttcatctttttcccaaattaaaattaatttatcatcactaccagaagctaaaaatctaccatttggacaaaatctaacacatgtaattgcaccttcatgtcttgacattgaacataatggtctacattctgatttatcaaattcaatattaccattattaatttcacttaattttttaaatttatttaatgtttcaattgaccataatttaactttaccatctaatccaccagttgctaatcttgaaccatcaggtgaaactgaaactgaataaatttcaaaatgtcttggaccttccgtatgtttaacccaggggaatttaacaatacgcattatttaatagaaatgtattcaagatttgatctatgaagcatgaaagtctaagtataaccaacatcatactaaccaatactacatcacacatagtaaaaatcatgaaaataatgtaaatcgcgtatggttacaaattatagaataggaaataaatatttattattttaaaataagctacaaactaaaaatgtacttaaaagataaactttacataaatgtattgaaattgaaattaaaatataatcaagagatatttcatcataaagtgattaacattataacctaattgactatatacaccatgtatcatatcaccaccatcatcaccatacattcacatcattcctttattgtagacacagacaactcctccgctgacaccagtcgcagcctttaaattaacaggcgcgccacattgagcgcggttaagagcatcttccttattaatagcaatgatgaattaaatgattttaacagtaacaattgaacacatacatgtaattgacaaacattggttatatttatcatcatatgatatcatatcccatatatgatattttattctcaagttttccatcttttcataaacaatttgtaacttcatcagaatggaaaaatgcttgcatcttcatccatctgaggaaaagaaataaaataagtaattttttttgtgatctacttcattgaaaaagacaattgaacaacaaacaaaacaacatgaaaaacaacataaaaacagaaaacagaaaacagaaaacagaaaaagtaaaacaagaaccaaccaagaaaccaattaaatagaaaagcaaattgtgtattattatgatatatttattattaacaagatattgaaatcaatattgatattaaaaataattgaaaatttaatcatcaagtcatgataaattcttctaaatcaaatggggcgttgatattttcggttgttaatggtgctgcggaccattattcatatttgtaatttaacaatattattattaaagtcctctcccaagggtatttaatgttttttttttatttttttttgaaaatttattgagttactttctttttcccacaaattaaactcacccaatcaaaaaaataaaatattgtaaattacaaatatgataaattaaagtgcattactgctgaatgcacactattaaacaaaccgaaaaaacccatttttgaatcatcattatcattttcttttggatcaattgaagtttcatcataattattaatatttgaatttgtataactataagtatttgataaattgaaatctggttcaaatgtatttaaactaataaaatcattagaattaattgaatcatcatctaatgtaaaattgagaagattatcagaattattatcaaaatcatcatctattggagttgaaggtaatgataaatcattaaattgaatagattttgaaggagatgaagtagaagaatataatgaaggagttaatgaaggtaaatcattaatttgaaaatccaaatccatatttaattgagaatcaagtgatggattagatggggataaaacaggtgaagaatcaattgaagattctaatttaatttttttattaacaggttcaacaatattttcaacaacaggttcattaactttttgttcatcattattactttcgtcattactttcagtttcattttcattttcattttcgttttcaatttcttctttatcatctttattaatattttgttcttcatcagataataataaatcatttggtctttgaattttttcaattaataataaattattatcaattttaatattattctcagatagtttattaaataatagagattgattttgataaatttcatttaaatttgattctaataatttaacataagattcaagttttgcaacatgttttctctttttttcacgagatgcatgagctgctttacgatttcttaaaattctttcgattctacgttgttccttttcagcatcagttctagctctctttcttggaggaagattaccaacaattgatgaattattatttattgtttgttgagtatctgaattattatttttagtagatttagtattaggagaggacatttttttttaaattgggtgagtttttagttatatactaggataaatgtggtgaaagttaactggtttcaagagaaatcaaaagaaaacaagaagaaatcaaatgaaaaagaagatccatcgcaaaagacaaacaatggaaaccagtgaaaaaaagtggatccccccttccttttatactctcctaataaataaaacgccaggcttagcgaaatctcacgttttctaattttatctaattttagctttactgcttgtttcacttgttataggagtattattattattattgtagtattttaatttgctcgtgtttttgtacttggttaatataaaattgtgttcatgttgtataatctgtctctatcaatatatacactactattaagataatatagtatattgttaatagactattatactaattataagacattatctccgttagaaccacaggcaggcgcgtcgatacacagtctatcaatatattacgtaataatataacgtagtataattttctttcaacatgaaaatcttaatagaggagagagagagagttgttaatacttttatttttattgtttctttctctagaactatcttcacatgtctgcatctcctgtaactaatggtaacgatggtgtatctcaaccacttggatcttttacaacaaataatgatactaatagtaacaataatatcacaaataacacagataacatagctaataatgatattaataatgaattagatgattcaacctaatgtagcatatgatcaagatgatttacctatacctcaaggtattgtagatgttaatatagatcaattagatcaaaatgaatcagttgatttagatttatcaaattctaataaacaaatttggttagttcgtttaacccctcaattagctgaactttggagaaatgatgaattcttaaatggtcaattacttggtaatattaaaatacctaaaacttcctttatggatccaaataataacaataataataacaataataataacaattcttcaacttatgcttcacctcaacaacaaaaaaataataaaattctattagacttaaataaagaaatacctgaacataaaaatcttgaaagtcaatatgaattaaaattaattaaacaagttgttgataatgaatatgcatttagtgaatctcaatttaaacaatttaggaaacgtttaatgtataggactcaagtcgttaatatgccagttcaacctaaaatgagaactcttaataaagaagctttaaatcatgaagcaagttggactagaaaagttagaaattataaaaaggaagctcaatttagagaaatgatggctagagatccaaattataaaactaaaagatcagagagtggtatgggtacaacttatttatctgatgatgatacatttaatccaaacaataataactcaaataacaataccccaagcattgatgaagaaaattttgattcaaatgatgaatttggtagtaattcaaacaataaatttaaacgtaataataattttaagaaaaatccaaaatttgaaaaatttgataaatttaaaaaatttataccttatgcaaagacaattcctaaaaaaactgaacttattggtaaaattgttcatgaatgtcaagttataccaactaaattagttgctgataataaattaaggatgttagaacaacgtagaagattaagtcaaatggctaaaaagaaaacaattaattatatgaaatcagaagctgttggtataatgcatggtagaacaactccaaatattcaaacaggttcaacaattacattatctaaggaattagcaatgaagaaagaagctgcaaaacaagatggtcgtaatgcaagattagatcgtgatgttttaatgaatattttatttaaattattcaatgaatatgaatattggactttaaaaggtttacgtgaaaagactaatcaaccagaaatttatttaaaggaatgtattgaaagtattgcagttatggaaaggaaaggtccttatgcattgaaatggagattaaaggatgaatataaaaagagtatagatgttgaaaagaaagttaaacgtggttctattgaagatgatgaagatgctgatattggtaaaaattctgataataatgaagaagaagatgatgatatgaatgatgttgaaatggaagatattgctgctgtttgatgaatgtctggtgtatactaccgtaattatctttaaaaagaccttttatacagtattgaaataaattatactatgaacttactctgcgaaattaattatataccgaatgatcttttttttgccttgaactcccatatttacttaaacttcttctttgatatctacactatataacaacccattgaactactaatatactatataaaaaactttattaatcaattatatcaatgtcgaaggaaaatattgaaggcgaatcttcaaaagattcaatttcaacttcaattacatcaaattctccaacctctccccaatctgatagacgttcttcaatatctcatatagttgatgcattatctccaaatgctgcagtaatatctccaacaaatacaaccgttacattttctactatatccagtcccgaacaaagtgaattgacttcaactttacataatttagaatcatctgatttgaaaactacagttaatgaaaatataaataaaactaatgataataataacgacaacaaagaaggcaaacctaatttaaatgaagaaactaaattaataaatgaacaaccaaatccaattgtttctataaaatcacaacccggtgtcaattttatcccaactgatgaatttcaagcttcatttacaggtgtaacaaataagaatacagatcctgtctcaatggttttacccgatactactgaaaaattagatccacatttgaaatcagatagaaatttatcatcaagtggatctaatgttattaatggtattggcgtagcattgggaatgtttaatgacaccaattcaacagccaatactactaatgacaccaatgaaaaaaatcattcaaaaaataatttagttaaatcatcgccattattatcatcaactccaccaacagttagtaaaagtctaattagatcatacccattcttaatattggttttaaaagtattgaatattttaacgtggaatgatgactcaaaacatctatcgatttttttagttttactaactactttttcaatattatattataaacctttgatcatttatttaggtcatttattaccagttttttctttatgggtttattctgaatgtaaagcatatatcaaggaacaacaacaagatttttcaactttagatgatataattcaaacaattacattgatttcacaacgtgcagatattttagtttctccaatagttgaattagatctaactgctggtgacttaaaaagattgcttttcacaacagttttcttatcacctatttatgtcgttataagtttctttattttaccaccaaataaaatgttattatcattatcatttttagtacttacatatcattctaaatggtccaaaattacaagaagtttgttatggaaatcaagaagttttagattattatgcttttatttaactggtttagattttgaaaattcaggactgaataagacatcaacattattcaacttaaacaagaaattatcttcaagatttgggaaatcaaataattcaaattcaccaaattctaacaattccaataattcaaaatcatcagtttgttttacttatgtaatttatgaaaatcaaagacgttggttaggtgttggatggactccaaatttattatcatatgaaagaactccatggaccgatgaattcttaaatgaatcagaaccaatagattcctttgaattacctgttttaccattatctatagatcttcaagataatgaagaagaaagcgttaataccaaaggaatggtatggagatgggttgataaaacttggagattagatttgaccaatgatggtgctattcaattaccatcaactaaaccaagaacaacagctaatcctaaagcagatagtggttggatttattatgataatacatggaagaatccatcaacggaggatggatttgctaaatatactagaagaagaagatggataagaactgcagaattagtctatgttggcaaagagagaaataacgcaccattaaaacttgattctaagggtaaaccttctaaaataaataatgaaacatctgtacaatcaattaaaagtacagggaaatctgtaaattttgctgatagttcagacaaggataatgatgttaatgaaagtgattctaatatatcgattgaatcaaagactagaaagggaggactgaaaaaatcagattctggtgaagttaaaaagaggaaatctttaagatttgaagaacctgtttagtttatgtactgtaatgtgtttaatgtaattttaaatataataaatttaaagttatttttaactatacaagatatttacaagaaaattataactaatcaatgatctttttagcatacatcatcttttcttcagttggattcaagaatctacccttcttgaacatgtaaatcaataaaattgttgatgcaactgaaagagaataccaagtaaccaaataattcatgtgattgttcttataatcaatctttggaattttacctaatggaacaccagcattgataaattgtaatggatcaaattcgtcagcagtatcaaaaggtttagatgtatcaataatatctggatgataatcattatcgttatttaatttacttgaatcaattttaggagatgatttccaaaatgcccaactactagtctttgcaacagcatcattaacagtatctgataatttattttcgttatttaaccattcaggcctatcatggaaattttgaagaacttgtaaataaacatttttcgtacctaattcctctgccattgcatcagcatctaaatattgatataattttgaatgtttttcatgatctaaatggaaaatacctttagttggggcaactctaacaacacattcaactgttatttcaccctttggacatgataaatgttgtaaatttcttgattgtggtacaactttatcggcagatatccaccctctatctaataaaacatcaccactcccattactttgaacaaatggacatataagtgtatagcctttcttaccatcatgtaatcttggtccaacataaacttctctactataatcaaaatgtcctgtaactaaaactttcctatattcaagatttggtaaatcttcctttgttaaattttttggtaatggaattggtttataagttaatctatcttcacattctgcaactaattgattcttccatttaagtcttttaacttgccaagtacctaatgcaaatgtaataattggcgctaaacataataaaccaaagaaaactttcctacttttagttcctgaaaattcaatgttttgtgataattgttttttacttttcattggactccaatcaacatttgctgttttaactgtagcatattttcttttcaacgttttaacaggtacatccctgactttaaatagtttaaatactctattcatggctaacgggcagtgcttttgaaagaaatacaagcgttaatcaatgtggagatacaatataactaaaaaaaattatggcgatgttaactaaccaattttcatgcaggaactggtttcctttctatatttctattttatttattacaatcagatatatatacacattaatatacattataaagtcttagatacatcaaccgcagcttctcttaataactgaagtgatgaaacgtttcttctttcatttgtaaaacatacttcttcccaaacactaccatgtaattttgacttctcattgaacaattcctctaattctttcatctcatctctgctaccaaatttaagcaaaaatgcataataaaatatataaccatcaccatagagatcatcttgacccaaacaagctttaaaaaattgatatgctctatctattttcccagatttccacaaatctttagcaatagtgagtacaactattggattatctttagtctttttcaatgctgatgaataaacatttttaatttgttgttttgttgcaagtttaatattatcacaccaaagtaatggagatgtcggaatgattgataatcctttggctaataatctcaatgcatgatctttcttattaacttccatttcgagtttaattttggagtgatacaatagatcagacttcggatgttttgttaaaccttcatctaagatcgatcttgctttaattacatttttattgagcttgtaatggtaagatgagagtgcaatgtagagtttttccttggcatcacataatttgataccttgttgataaacttcttcaacagtatgatgattatcaccagataatataagatcacctttagcaagataaacgtttggctcttttggatacacattcaaagctttttcaagtgttttcaacgccattgagttattaacaaatcttttctcaatggaaacttttttcaagaagaattcaacacttggtgtggatatagcttccagacaatcatctaataaatctaaaatgatttgaattgatttattatgtttcatttcaaagtcaattgcataaatccataatttttcacttttaggatttttaattaatgcatcagacaatgtagatttaatttgatcaagatcaaaatcatatttaatcttatcattaatgtaattgatataaagatcaacattatcaggtaatgtagatatcgccatttcataagtaataaacaaatctttgtattcctttgattcttttttgaaaataatccattcttcccagcctgttacaaaagaagggtatgatgctgtaacaaagaaaaataatgcattagatattatgggatgattagaatgatgatatgatttagctttctctattaaagattctgcagattctttacaattttgtaaagtttgtaaaacaatttgacgacaagttaatggataatcgtttttttcacagttttcagcttgttcaaaccagttaatatcattttcatctttaacagattcaaatgatttctttaaataattttcaattttaacttcatttgatgaaaatttttcttcaattttggaaatttgtatccatataaaatattgattcgccaacgggaaattatcaactcgatttctcaatgtttcaattgctgttttggaatcttgtagttccgataatttaaacaacaattcaatagaacttggaattaaagttattgccttttctaacattttgatagcaatcaatttatcactttcagtttctgcaattttcatccatagttcagctgattttggtagaaactccaatgctttccgtaaaattctcaacttagatatattatcagtttcaaattccactgctttaatccaaagtttcaatgatttgtaattatatttaattgcatctgctacaataactttacttgtaggaatatcattagaattgatttctaaattagttagccatatatcttcagattttggacataattcacaaccttcctgtattatttctttggcctttttaatctttttggcatcaaattctaatgtagcacttgcaatccaattttgtggattatgaggatttaattctctaagttttgtaaataatttccttgctttcttataatcaccaattttatattgagaattattagtttcttgtaaactttctaaataagtatttttatcaatttcatcattagataaagttactttaccacctaatcgaagttgtgtctctaataatctatccttggcaagagataattcgaaaagattgacctttgaatctacttcaacactattattattattattgtccttcaaatcgtcctttatagtatcattatcaatctcctcattatcattacttaaagaaaaatctgttgcacctgtattttgaagatccaatgtaattctatctgaatttctataaaaacgttgttgttgttgaagttcatttcttaatcttttatttcttcgtgtaaaatccccagattcaggtaaatttaaccattgttcctccgatattgtagccaattcctctttaacatcttgaaattgattagaaatttccttcaatgaatatgctaatgagtttttatcaatatcattggtttcatcatcagcattagtgtcatcatttttacgtttaagctttttatttctttgattttgtaaatgttgctcaacttcattgtatattttatcagcttcaatattctcttgttctgtttttgaaagaatttgacgataattcccattactaacatcatcaaattgtccattattactattatcattattatcatctattttttcatatgttgtaattggtagattttgtgatatttggaaattatttgtagttccaaatccagttgcccctctaccgataccagcagtgtatccaggaggaggctcctgatccaagaaatcaagattgatcatcctacctgtgtataccttttagttgatgtctctcttaagactgatctttcccagtataagcaggtataagtataaagcatgtagaagataaaacggaaatttcatgaagatttcaaaacttctgtgaaatttccgaagaacaaatttttttttatttttcacctcaaaaaaatttatttttctatgaaaccactttaaagctgtagaagtttaaaagttgtagaattttcattattttggtaaagcattaagattacaatgtctaaaagaggtgcatctgaatttgaaggagataatgctgaaagtaagaaaaatacagcaaataaaaatgtagatattgaaatggcagatgatgtagaagatgatattgctaaacaattaggtattgaaggtgaaatggaaaatttatcaggtgatgattatgatagtgaaggtgaaattattgaattagatcaatctgatgaagaattggagaattctattgatcaagatggattaattaataaagttaaaaatcaaacacaagaaggtgaaaatggtgaaaatgaattatatttaccacatagatcaagaccattaggacctgatgaagttttagaggcagatccaactgtttatgaaatgttacataatgttaatatgccatggccatgtttaacattagatattttacctgataattatggtaatgaaagaagaagttatccagctaaaatgtttgtaacaactgcaactcaagcatcaagatcaaaagataatgaaatgataataatgaaattatcatcattatctaaaacattagctaaatcagaggaagatgaagaagaagatattgatgatgaagatgatgaagaagataaatttaatccaattttagagagtgaaactataccattaaagtttacaactaatagaattagagttaatccatttgcaagtaaaacaaatgaatatttaactgctacaatgtctgaaaatggtgaagttcatatatttgatatttcatcacaatttaaagcatttgatacaccaggttatattattccaaagacaagtaagagaccaattcatacaattaaaaatcatggtaatgttgaaggttatggacttgattggtcatcagttgaagatggatcattattaacaggtgatgtttcaggtagaatttatcttacacaaagaaataataataaatggcaaactgatcgtacaccatatcaaattaatgattcatcaattgaagatattcaatggtcaaaatcagagaagacagttttcgcaactgcaggttgtgatggatatgttagaatatgggatacaagaacaaagaaacatacaccatcattaaatgttttagcatctaaaagtgatattaatgttatatcatggtgtgataaaattgattatttattagcatcaggtcatgatgatggatcatggggggtatgggatttaagaaattttaaaccaaataatcaacctaaaccagttgtttcatatgatttccataaatcaccaattacatcaatttcatttaatccattagatgaatcaattgttgcagtttcatctgaggataatacagttacattatgggatttagcagttgaagcggatgatgaagaaattattcaacaaagaaaggaaagtaaagaattagatgatattccacctcaattattatttgttcattggcaaaaagatgttaaagatgttagatggcataaacaattacctggtactttagttagtacaggtactgatggtttaaatatttggaaaactatttcagtttagttatataatataaatctagaaatatgtacaatttaatttataatcttgttaacaaaaatattgatataacgggggtatacaaggtattcataagactatccctatggagatagtaaagaagaattttcatcaattatattgtgatgatttgcattaagtaaattttcttcagcaatacgtaattcagcattagcttcagttaaatctgttggataattcaattgaaaatatatacacattgaaagtaataataattgtaaaatagctgatacgaaataaggtaaccaagaactccaaactgaatttggttgagcccataaagtataactccaaagaaatccaccaggagtttgaatcatcatcatggggacagataaactacctggatgtttaacattaaaagtagttaataattgaggtaagaattgtaacagagcaaataaagttgataataaacctgatatattagcaaataacataagtaattcatgattgttagtgatgaatgttaaaaatatgagaattgagatattaatcaatatgtaaaagatgaaaattttaaaatatattactaattgatgatgattaattggtggttcccttaaagaatttgaagttgcaaaaacacagagaatgaaaattaaaatacaaccaattgcttgacttaaaatttgaataaatccaatcattgaacttgaacattggaaaaaattaagggataatctacaacaatctcttacatccattgttactatataaatattgatgaaggcagataaagctgacagagaacctaaaagtagataagttggagacagaccttcacttgattttctccttatgactttaatatgttgtggaacatacgaaccaaaaatccccaatgccatcaccaccccgacagagagtgacagcactgtcgggtgttgaaacactgcacagtccatcgtcaatatctccagaaagattaataagtttcctaaaagagcaatcagcagatataccagtagaagagttgatgtattcatgtaaagtctttacgtaatcatataatataaccgtgcaccataataattataataccaatatttaattttctctctttaatttttttgaggggagagtaatagttaatagagttgattctactggtagaagggtatataataatactgtatagatacttcattagagcaacaatgaccactcctactgctttcgctgaagctgcaagattctctgtcaccaatgcagaacttagattacgtgtgttgaacttatacagaagatatttaagacattcaagagaattcgttaatagttatgatttagatatcccagcttatcaagtaaagactaaaattagacaagaatttgagagacatagatttgttcaagatttagcaattaaaaatgttctctatatgaaaggtcaaatggaatttcaagaattagttaatttttggaaacaacaatgtcatgttatgaaatatttcgaagattttgaacattatagttcaatatcaaatgattcattcgttcaaaaattcttaaaaggtgctactcaagcttagttctaatactaactaactacatatacatacatattcacttcccatttttatactactatttatttattttcttaaaaaaaaatatcaaatttaaattaaactactcattcattcattcattctctaaatatgatttcatctttgtaagacatttatgtgtcatatctttatcaacaatctttaaaaatctaactaattcaaatgctgtatcaaaatcttttgatataattaatttctttaatattgtaacaacaacatcttgatcatctttactaatctttgattgtttatccttattcttattatttttattattcttacccttagattttggtctcttaatatcaactatactataattatctcccaaggtatcatatttctcataatttaacattataatgaaaaaatgtgctgtaagtctttgattattagattctgcaaataatttattaacaatatatcttggtctctctttactcttttcaaaaaatattggccaataatgtgtttctgtctttttcaaacaattaagtattatatcataaattgatcctgtaagtttaattaataaatataatctatcaaaatattcattttgtaaatcaaattctttattatcataacattcctgtaaataatcaaccattaatttctctaaaacaaatttaaaattcttaaatttagaaaatttttgataaactgtcttaatattaattgcattagaatcttcctctaaatgtttaactttaatatttgattcaatataatgatcaacaacatctgataaataatttcttctaattgtctctaatttcaaattaactctatcaaaacattcaacttcaattccaaatacaatattttgaaatggtatagtagtaatcggatatggacaaactcctgaatatttaacaattgtctccatttcattatctcctgtgataatatcatttccaatacttatattaatagattttaactttaacatatcaatatcatcacttaaactataatgtaataattgtgatccatcaaataaacaaattaatgaattatttaatttatgaacatattcaacactatcattaattaaataaatattatatgaaaaagtaaatgatttgggcattttttccctcttaatataatacagatcagtatttgttaaaaataatatatcagtttcattaatcttcaaaattgtaccataatttaaaacaattgattcatcattctctttaaaacatgcacttaattgataaactgttgatttttgaataattattgatgatctcattaattttaatgatctctcatttattaatttactattattattaacaaattcttcattatttaattccctatcctttaattgttttgataattttaaattccatgtataacaattaatcttattagttataacaaataatgtatcagtgaaaatatcaatattaaaattaacaaaattttcattttcatatggtgtatcaataaaattaaaattccaaattataaattcagaactaaaattttcatgtttctctaaaatcttgtttgaaaatataacaacttctgatttattatcattatcttgtctattattagaggcaccattattaccattattataactattaaaacctaatattaaataattattccaccatagacatttccttgcacttgtctcaattttttcaaatttatttgttgtatcttgattaatttgtaaaaatttccacattttagttaaattattgaaaattataatatcataattaccaattatacaaacataattaccatcattactaacacttgttgatcttattgtatgattatgtaatctaaatgataatggtaataattcatttaaccaaatttcagtttccttatttgttatatcgtttatattataattataatgatgatgttcaattgattttttttcataacctttgaaaatatgaattttatcattatcatataataatggacgtttaattgataaaaaattgaatccttcaccattatttatcactgttaaagagattgttaaaatttcatttgaattgttgattattattaaatttttggaacttaaataattaattttattacaatttgtaattttcatacagtcatattcaaatgttgaaaaatttaaattacctaaaagtgaataaatattccatccattatcaaaatgaactaaaaatgaatcaccattcggatgtaattgtaaatttaatggtgttttagatggcaaacatttctttatccttttcaataatttaaatgtaaaattatcataaagtttataaatcagtatatcaccattctccagtaatagataaaccaaattctttaaatgatttatcaatcctttaacaacttttatattgtcattcaattcacatttgaataaacatttaacattaaaattaaaatttgataatgattccccagtatgatgagcaattaaaacatcagaaaattcatttatccataggaaacaattaagatcataattatattccattttattaatttctccaccattattacaattaacatccttaaaccattcaaaatctttcaaatctctataattactgtctttatccttaccttcatcattattattttgattatttaaattaattatttgtaatgagtgtggatctttattaattaataataattccatactacttgtaaaacaataatcaattacatctgttgaaatatttaaaattaattttaatcttaaacctaaatcataaattggtacttcaccatcatcaactccaataaatgaatcaattaaatttttaacaataccattattaccactggtactagtattattattattaacaaattttttattaataccaccataaccaaatgaatcatcaacataatcacttaatggataaccattttgaacaattttcgaatttttatcataaattgtaagtaattcactatcactaccatttaatttaaatgtataaataagtaaaatatttaaatttgttaaaattgcaattgtttgttgatttggtgatagtttaattgatttattataaccaaatttagtaattgattcatttgatctaatatgtgcattaattggtactttatgattccaatcaaataaataaattgatctataagttataataaaatatggtaaattatttgaataatttgttaaaatatcaattatttcatcattatgaggttcaggtttatattcatgtttaactttttcattagaacttaatttatttaaatcttcagtttgtggtagtctttgaatagtctcaattgatgatggccaatgcattgtcaatagaagaagttgagttaaactctctcttaaggaataggtgaaaaaatataagagcgtgtgggatcttctacacagtaaaataatattttttaagattattagatactagatatacatttaagacaaaatatataataaattcaactatcaatgcttatttggaactaaaatatatacgtgtatattacattggaaaagtaattgaattgaaataaaaattaatattattattgattattgaatatgaatatgaatatgaatatgaattgagttatgaactatgattttattaaatttattgattttattgattgacattaataaatttctaataaaccaaaataaatctctaagaaatggaatccaaacaagcattgtatatgtagatgaaattttatttgagaaagagaggttttgataaaaagataaagaataaaagtagaaaagttgaagaggaaagaaaagaagaaaggaaaggaaagaaagtgaagaagaaatgaaatgaaagaaatcaaaatgaaatgaaatcaattagtttattcatctatttgattttgttcatcgaaatcaagatcatcatctaaacctgttgcatcttgatattgttgatattcactaactaaatcattcatattggattcagcttcagtaaattccatttcatccataccttcagaagtataccaatgtaaaaaggcttttcttttaaacattgcactaaattgactaccaactcttctaaataaaccttgaattgaagttgaattaccaacaaaagttgctgacatatctaaaccacttggaggtacagaacaaacagatgattgaacattatttggaatccattcaacaaaataatcttgatttttagtttgaactttatgcatttcatcttcaacttctttaacacttgcattacctctaaagaaagcagcagcagttaaatatctaccagttcttggatcagaagctgccatcatatttcttggatcaaacatttgttgagttaattcaggtactgttaaagatctaaaagattgtgaaccttcagcagttaaaggagcataactaaccataaagaaatgaagtcttgggaatggaactagattaacggctaattttcttaaatctgaatttaattgacctgggaaacgtaaagaagttgtaacacctgacatgactgatgaaactaaacgatttaaatgatcatatgaaggttgattaatttttaaagttctaacacaaatatcatataatgcttcattatcaatacaaaaagtttcatcagcattttcaactaattgatgaactgataaagttgcattataaggttcaacgacagtatctgaaacttttggtgatggcataactgagaaagttgccatcattctatcagggaattcttctctaattttagatataagtaaagtacccataccggaacctgtaccaccacctaaggaatgagtaatttggaaaccttgtaaagaatcacaaccttcagcttctcttctaacaacatccataactgaatcaactaattctgcaccttcagtataatgaccttttgcccaattattaccagcagaattttgaccgaaaattaaattatcaggtctaaataaattaccaaattttgaagatttaacattttcaattgttgcaggttctaaatcaacgagtacagctcttggaacatatttgccacttgaagcttcattataataaacatttaatcttgatttttgtaaatcattagtaccaatataattcccattagcatctaaaccatgttcatcacaaatagtttcccaaaaggcagcaccaatttggttaccacattgacctgttgataaatgaatctataataaataaataataaatagtaaatagtggaaaattttaagttagtattgactgtgcaattaaaacaaaaacaaaaacagggaattcagtatactatactatactccctccctataccctatacaatacatacgatctctctcatggcagtgacttgtctacagatacaaaccaaacaagacccaaaagcatttaaaagctcaaaacaccaaaaccaaaacaaagcgaaaaatcaccaaattttaaaaaaccgctgcttaaattaaatgaaaggtaaacacagtgattacataaggtcttctattatactattatggtacatagatacgactgaaaccttcaacttcacctctgcaacagacacaggttgcaaattctcgtataaataatgatactctgcaactctcacagatagccaaacatcgacatggccataatactatttgtctcgaattttcatgacatacaacacagatacctaattgatcatcattaatttctttacatgaatcatcatcattaaaagtttctttattattatcattattatttaccctctttaatctcctttcaattaaataatcaagtaatttcatatcatctgtataatatttggagaaattcgatctagttaattgtgatattggtacaaattccttttcgtgactcatatgatacgtcataatatgttgttctctcatatcagtaagtatatgattaatatcattattagtaaataattcttgtatttcttcatctgatactatagattcattgtctgttggtatatcttcatcataatcatcttcattatcatcatcactttcttgataatcattagattcatcattttcaggtaattctgtatttagtagtaattgtgaatacattttattaagatcctcatcattaatttcatttatattcaatttgtcattattattattatcattatcgttattttcattatcattatctaaataaatacatttaacaccattatcatcctcaattattctatacttaaccactttattattattattactattattattattatcattaattctattattattccttttcctaaaaatacttataatctttaaaactattaactttataaatttcataaccacattattgaacattttcaaccttttgaaaataacccatttgaaaacactaattttcttaatttcatcattttgtttttcaatattcattaattcaggattattaattatttcattattataaccattcatgttcttatttttatttattttattcttcatattattaatctccatttgaataaaattatcaattggtaaataaatatttgaagtttcccttatataacattgattaattgataaatttaaaatgaattcaccaaatttaattaatgcagtataaaaatcatcagataatgaaatattaattgaattccaattaattaataaattattaattaataaatcattaaatgaaaatttaactaaacctgtagttaaataaattaataaacttaaaataattaaatttaaaatacaaaaatgtggtaaatatccaataattataataactggtaaattggaaattgaaccattaattaaattatatgaataaaatcctaatgtaaataaaccaattattgttgaagttattaatttataattaagtaaattaaataatcctaataaatgaatatttaattgatttaaaattgaaattattgcaattattaaaatttcaattgaaattgaattattattatcagcagatttttcaatttcttgaaatgctaatgaatattcaaataatgttatacctgtttccattgaaggttttaaacccgatgcaactgatataaatgtatcaaatatttgactaatacataatgataaatgtaatgattttaatatattatcagtagtactagtagtattataatcccataattttaagaaaatttcataagtaccaattaataataaataaattgcaaaaattcttaaaattatattagaaattaatggtaatctattatttcttctacttgatgcaaatataacaattctattcattataacagcagttatcatacacatcattgaaaatggtgacatccaatatgaaataaatgcacttgcaccttcattattaatattgatattattattaatactattatcctcctttgattgttgataaatagcatttgagaaagaatctaataatcgtacaataacccaattagattcaatatctgatactgtatcattaccagacatcgttgtcgttccctactgataagaaacccattctaagataaagcattaaatcctattaagaagacataccaccactttaaaaaatttaaaaatcctctgacgcgtcgggtgggttggcattaatttaaagtctcttacagaacatgaatatatattatatcattatcttagttgaagaagatgataagtatacacggtagagcataggagagtttcttttgtgatacggtaatgggaatatagtaagatatttaatagaaattaggaataatatgcattttaatggtattgaatcaaatattggtgatgataatgataatgatgatttacatataccaaatcaatcatatgatgaaatattagaagtttgtaattcaaataatatttcaagacttaattcattaaatttaccaaatttaaagaaatttacaaataatgattcaattgttaaattagatgaaggttcaagtggtataattttcaaagttaaattgaaaattgataggaaatcatatgttttcaaattaatgaaaagtgaagaagatgtgataataggggataaattggaaagtaaaccattatcaagatcatcatcaaataagagtaataataatagactgaatttattaactaaatccatttcaaatatttcaattaattcaacaaataatttagaaaatatatcaccattaaagaatcatcataataataatattgacgatgagaataatgataataaaataattgaaaagaaaattaaacctgattatactttcaatacattaaatgaatatcttattataagtaaatttaaaaccaaacatataattgaaagttatggattatttagatatattgaagatgaagtattagattataatgatacagaatcaattgatagtgaaatatcatcaaatgatgatcatccacaaatatttgataataaaccaattaatattggaattttaattgattatcatcaaaatggtgatttacttaaattaattactaatatacgtaaaaaaaatttaataatttcaaataatttaaaagattttattatgttacaattagttgaaggattaaaatttttacatttaaatgaaataattcatagagatattaaacctgaaaatattttaattgataatttaggtaaattaaaatattcagattttggttattcaattgatattaatagaattaaagattatcccataaatgatgaaaattttttaattaagggtacaaattcatttaaaccacctgaaattgttaattttaaaatattgaaaaaatttcaaaatgatattattaataatgattgtaaaattttgaaaaaaattgatatttggtcattaattatactttattatcaaattaaatttcttaataaaccatggaatattgcatcaattgataatgataataattttaaaaaatttaatgaaaaatatcaattaaataaaattaatttaatgaaaactggatttgaaatgagtagaaattttaatttaaatgaatattttggtaaaaatattaattcattaaaggatgataatatattagttttaatgaatatgatgaatcctgattataataatagatgggggataatggaagtttatagatcaaattggatgttaggtgttagaatgagtttagaagatagtaataataataaaagtggttttaagggtaaggttgaagagaatgaaattgtgaagttacttcgtatagtttaggattttgttaatgattattatattaaaaaaagctggatattatataaattattgttaactcttatttgttgaatgctgtgatagtaattttaatgataatagtaatagtaatagtaaaggtgaaaaaagttatgaaaagataagataatttgagaaaagaaaataattgaaaataagtgaaaataagttaaattgtaacgataagaaaagataagataatataagataagataagaaaagataatggataatggataatgatcataattatgataaattaatgtgtatatttgaatcattattatcatttaaaatattgaaaacatttaaataatttttttcattattgataatatttggtaatagattattattattattaatattaatattatttgaaataaccactttatcaattaaatcaatttctgaatcaatttctgaatcagaatctaaatcagaatccgagattgattgtgagggagaattaatgatttcatgtaaattcatatcagaagatgaattattatttaaatcatttaagatatctaaagtttgatttaggaaagataaatgtttttctctattgataatttgagtgttaattttagtgttgttattgatgattttattatcattattaatattattattatttaaatcaccataaatgattgataaattaatatttggatttgtaaatctatcattaataaaagtaaatttatttgaaattgaattatcaggtattgtaaatggggagcaaagagatattaatgaatcatttgaaataattgtttcactaatattttttttttgttgatttgagcttataatattaatattattattttgattaattgaaattgaattttttgtattaattgaagatgattttttcttttgattgttattataagagtttctattatgatgatatctattattattattattattattgttagtatttggaatgatattattatttaattttggatttaaatgaataatatcagaatatttactattattattattattattattattattattattactattataaaaagcagatctatctctctttgaaatatgagacattgttatgaaaagaagatgataatataaaataatataaaaaagcagaaagagtggcaaaaaaccaatgattataaaaacggggggcaaagtgccctcttttgtacttattctaaatcagatcgattaatctaattctaaatcatttaatttagtcaaaggggtgtatactaagtgtattactaacactaatttcactagtctattaaaattacccttttaagaattatttagtaagttataagattattattattattacgtaatattgaatattatattatcttatcttatctcatagtatagagtatccgctccactgggtcgatgggtcgataagtttttctaaacgtcgatgagactatcattatcatcattacataatcaatatagaagacatagacccttaaacatatagacatagacataaattaatatcgtataatactgcaacattgctatattattattattattattattgcttatgtatttacacggtttatcttatatatatcattgcttttattttattttatcttgtttttatttgtttgtctgtcttattttatcataatataactatctatcaaactcataacaacaaatccccttttttcagctctttctcatatacattaatattcacattcacattctctatctatatctctgtacattagtctattatcataataatcatattattatcattttcatatcatttctttcgtatattcataaatctttacttaataatgtcttcattatatgcatcaaatctttctcatgaagatttaaataattcaattaataaattatcaattaatactaatttaaatgacgataatattaatattaataataataatcttactcattcaaattcaaattcaaattcaaatcctaattcaagtttaaatttatcaaattattttattttaaaaattaaaaatttaccattggatatttcaattagagaagcttcacttattttctctctttgtattaatgatgttttctttattgatataataaatgattcaatatcaaatttaccaataatttattcaaaattttattcaaaaaatatcgcatttcaagttttcaatttattaaataataaacaaattttcggtattaattatccaaaaattatttgtgaattaattgattcaaataatgttttcccaattccaattccaaattcaattcctttcacttcaactcaaaataattctccaatttcaaaaaatgatttaaatctaaattcaaatcttaatattaatacaaatttaaattcaattcctctaaatacaccaaataattcatacttatttaatgatgatataataaataacaacaatcctcattcacattctcctactaataatacaattaatgaattatcattattattaaaaatacctccaccaattaatccagctgatcaaaatcctccctgtaatacattatatgttggtaatttaccacctgatgcttcagaaattgaattacgttcattatttaaatctcaaccaggttttaaaagattatcatttaaatcaaaacaaaatagtacaactacaattaatacaaacaacactaataataataacactaataatcatggtccaatatgttttgtagaattcgatgatatattaatggcaactaaagcattagctgaactttatggtaaaacattaccttgtcaagaaaataattcaaataattcttcaaaaaatggtataaggttaagttttagtaaaaatccattaggtgtacgtagttcaaatcaacaaagaagaaatttacctcaatcaaataataataataatactgttaataataataatactattaataatactattaatactacaaataacaatcaaccatcatttcatagaactaattcattaccaattcaattaccaatagttaataaaatgacaagtatatcaaataataattcacaaatacctccacatacagctaataattttcaaaattttaataacttaactaataattataataattttaataataatttcaacataaataataatattaataataataataataatttattaaatataaatatgacaaatttaaataataatccgaataatcaactcaataatcagcttaataatcaacttaataattacaatttaaatgcattaaatctgaatactaaatcttataatgaattaaatcccaataattaatatgaacaaacaaactgcttctcttttttactcttttactttttacaatacaataaattgtttcttataatttcaatagactttattaaagtcattggattataatttacaataatcaaatgctatattatattatcccctgtatactactatttaatttaactttatacattgatcaacacctttataattaggtacttcaaacccccatttatctgcaatatttttacttataaatctaccacctaaataatgatttgtaatgggagaaattttcaatgaacatggtttaggagctgttaaactaattaacatatcaggcatataattttcagtaattgaatctttaattggtccatcatcaacatcccatccacttggtatatcaactgctataattttcttatcattattttcattcttagatttaattattgttgataatattgaatcaaatggatctcttaaaggaggatgaaatgaaaatccaaacattgaatcaataattaaattagaattatttaaaatctcattatttaatttatcattaacttcaatattaaacattttcaattgagtaattaatttatcataaaatggatttttacccttaattggataaattacattaattttttcatatccgaataattttaaatgtcttgcagcagctaatccatcacccccattattaccaggtccacaaataattgttgcatttggatacttgattggattgtattctttgtaaatactttgtgcaactgataatcctgctaattccattaattgttctaatgtatatcctaatgttgacattaatgatgcatctaattcagctgctgttttggcactcaatggtttcatcatttgtgtgtaaatatgcgttgtttaaaagaagaaaatgattgttaaaaattcaatcttttctaaaaatcaatgtgttattaattaatcgttaattatgtcatcccccgcaataacatttttttgactcagccgccagctaatagggcatcgattcttttactgagttattgattgtttatttgactgtctttctttttcaaattctctatgcatcattgtagtatcacagttatggcactgtggatatttgccacatagtatattattatcagctcttctttaaatgatccattaggaaagaattactttatgacatactattgaaggctcatcatcaacataattcaattacggtaatttaacagctcaaaatactatcatccctttccattcaatccttaaaacattatccattccattattccatgtaatgactatattctcataatcacatatccaacagagaagaagacatatagagaagtactactatcttatctcgtataataaagagttctcatataatataaacaaaagatgagcctcctatattcgacgcgactgtgccaacgcgttattttcttgaaatttctcaaaaattcaatttttcgttcttaaaggaaattgaaaattaaacaacgaatcaacaacaaacaacaccctgtttgttattgttattgttgttattgttattggtaattatcaccgtatctattcacaatgacaggatatgttcgtaagaaagataatagaagaggtataaggtttaatcttttagtcactggtaatcaaggaacggggaaaactacctttattaattcattattagatcaaaatattttacctcatagatatcaatataataataaggggaataatattaataatattagtaataataataaaacaataccaaaaacaattacatattcaaatatatctgcattaaatgcaattgatttaaataattcatttgatccaacaaattctcatttagaacctggtattgcaattactgaaacatcagttgaaataattgatgatgataatacaaaaattttattaacaataattgatacaccaggttttggtgataattttaataataatatttgtattgaagaaatttgtaattttttagaacaacaatttgatttagttttagctgaagagacaaaagttaaaagaaatccaagatttgaagatacaagaattcattgttgtttatattttattgaaccaacgggtcatggattaaaggaattagatattcaatcaatgattaaattttcaaaatttgttaatattttaccaattatttcaagagctgattcatttacaattgatgaattaaaaaaatttaaaaaaaatattttattagatattgaaaaatttaaaattccaattttccaatttcaaactgatgatgatgaaactgatattgatttaattgaagaatcaaaatatttatcaaatttacaaccttttgcaattataacttctgatttagaaggtataattaatgataaaaagacacgtattagaaaatatccttggggtataattgatattaatgatacaaatgtttctgatttcccaattttaaaatctgtattattaggttctcaattacaagaattaaaggatattacacatgatttcctttatgaaaattatagaactgaaaaattatcaagtgttgttgatttgaaaaataattttaccgattcaacttctaatgaattttcatctcaaataccttcaatgtcaaatttagctgaaattgcaaaatcacaatcaatggcaaaattcgatttacaagctaaaagatcaaatattgatgaattatcagaatctttagtaaaatcgactattgatgaatcaaatataataaaagaagaagaagaggaggaagaggaggaagaggaggaagaagaagaagtagatgataatgaagagaaacctattgaagagcaagttgaagaatcagatattggaaatattacaaatactccacaatcagtacatcgtgaaagtttacattctgaagtttcaaatgcatcacaatcaacattaatcaaaccatcaataattaatagaagtgtaacaaattccccacaattatcaattaatagtaataatactaataatggatcatttattggtaactttcaagtaccacaatcacaaattgatgcaaaaaaattacgtaaaattagtgatacagttccatatatgttaagacatgaaacaatacgtagtaaacatgcaaaattagaggaattagaacgtcaaagtgcaattgaattagctaaaaaggcagaagaattagaacgtaaggcaagagaattaaaattacgtgaatcaattttaagggaacgtttagaacaaagtaaagctaaatcattaacatcaaatagtgttgttagtgttcaaagtgatgttcaaagtggtattcaaagtgttactcaaagtgaaaatcttgataatgataaagatgaagttaaaactgagacaagttcaaataaatttattgattccactgatgataattagattaaatcttttataactgttataaatgttatgactataacaataaataaataaatacctctatcctattaatatatatcctactcttatcttattggcaaggtaataaacgatattaacggcctattgaacgtaaggcacacgatttattttgttaaacgcggcagaagttacctgggaggttatctttaactctctttttatatgacgacttgtttcctttttatgtgtatatacttgagttaataacacattttattacatgaatattctgaaaacacaagcaaaaatggcatctaaagcaacttcaattgaatttgaatcattaactaaatggacaaatgattttaaatcagatattaaaacacaaattggtggatcagttttacaacattcaaatattgaagatgttttaattaatagagaaagagaaattaaagatattaatgttttcaataataaaattgaaattgaaggtttaccagttatggatcaaaaagcatcaggtagatgttggctttttgctgcaactaatttattacgtgtttatgcaatgaaaaaatataatttaaaagaatttaaattatcaccttcatatcttttcttttatgataaattagagagagcaaattatttccttgaacaaattattgatactcataaagaaccaattgattcaagattaattcaatggtttttaactgctcctgttgaagatggtggtcaatttacaatgatgacacaaattgctgataaatatggtattgttcctgatcaaatttatcctgatagttttaatacaacaacttcaagaattatgaataaaatggttaattttaaattacgtgaatatgcaatgactttacgtaacgcattatcaaagggtgaagatattactgaaatgaaattagatatgcaaaaggaaatttatcgtttacttacaatgtttttaggtaatccaccaaaacctaatgaagaatttacttgggaattttatgataaagatggtaaatatcaatcaattaaatcaactccaaaaaaattttcaaatgatgttttagaatttaaaacaccagattatatttcattattaaatgatccaagaaatgattataataaaatgattaaagttgatagattaggtaacattttcaatggtgaaccagttaaatatttgaatttagaaggtgaaaaattagctcaagcagttattaatcgtattaaaaataataaaccagttttctttggtagtgatacaccaaaatttatggataaaaatcgtggtataatggatacagaattatgggatttccaattattaggttatgatattaatacaatgtctaaaaaggatagagttttatatggacattcattaatgactcatgcaatgttaattactggtgttcatttagatgataatggtaaaccaattcgttatagagttgaaaatagttggggtacaaaatctggtaaagatggttattatattatgactgaaaaatatttccaagaatatgtttatcaagttgttgttgaaaaggatgaattagctgcattagatgttgatgttaatatcttagattcaaaagatgaaattgttttaccaccttatgatccaatgggtgctttagctttataattgagtgtaaatagatctttatctttatctttatctttatctttatctttatctttatataactataactaacataactaacatcaattcgaatcctgtaatactcaaataatgaaacagcgcaattgggaaacttctttttttaacctctcatgaaacaagacaatttaaattgaatttgcttttattgtgtatacattgctttttgctattgtgaatagattcttttttctttatttattgtacattattgccatctaatcacattacaatgaatgtattgtggttattaaagatattatcattttttatattagataataaacttgtcaatgcatctaattgtgcatctaatagatcaaatgatcatgaaaatttcgattatttcatagttgaaacaaaaaattataattataataataataataataatactgaaattgatatcaaaaatattgaaaatattcataaagattggaaatttgaatattcaattgatttcttaaataatttccatgtttttagtctaccgaaaaatcatcatcatagtcgattgtttgatgaatttaattttgaatcaattgataatataataaatcaaaatgatttaataaataatggtaatttattgaagagagaaaataaagaattaatagaaaatttatataataacaatgtttatggtatacaatcattgaaaaagaggaaacttgaaaaaagattaccagttccaattgattattcaaatactaatttatcaattagaagtaaacaagattcaaccgttgatgagttaaataaaattagtgaagaatttgaaattaatgatccattgtttaaagatcaatggcatattttcaatacagctcatttaggtaatgatgttaatgttataccagtttggagaatgaatattacaggtaatggaattgtaactgcattaattgatgatggtttagattatgaaagtgaagatttaaaagataattattgccccgaaggttcatgggattataatgataatagaccaaacccaaaaccaatgttatcaaatgattatcatggtacaagatgtgcagctgaaattgccgcttctaaaggtaataattattgtggtgttggagttgcatttaattcaaaagtttcagggattagaattttaagtggtgaaattacatctgaacaggaagctcaagcaatgatttacggattggatgttaatgatatttattcatgttcttggggtccacccgataatggtaaatcaatggatgcacctgataaattaataagatcagcaattttaaaaggtgttcaagatggtagaaatggtaaaggtgcattatacgttttcgcaagtggtaatggtggtacacgtgaagatggttgtaattttgatggttatacaaatagtatttattcattaactgtttctgcaattgattataaaggtttacatcctcaatattcagaaagttgtacagctgtaatggtttcaactttttcatcaggttctggtgaacatattcatacaactgatattaataatcaatgctcagataatcatggtggtacatcagctgctgcaccattagctgcgggtatttatgcattaattttagaagcaaatccagatttaacttggagagatgtacaatatttaacagttttaagtgcagctgaaattgatccttttgataatacttggcaaaatagtgcaataccaaatcgtaaatattcttcaaaatatggttggggtaaaattgatgcagagaaaatggtttcaatggcacagaataattggaaattattaaaacctcaatcttggtattatacacctttcagattcccaaatttgaagttagaaaatgaaattggtagtgttgttgattcatttacaattactgaagaaatcttacaaaaggcaaattttgaaaaaattgaacaaataactgtaactgttaatattaaatcaaataagaggggtaaagttgaagttgagttaatttcaccaaatggaattatttcaaaattagctcattcaagatctcgtgatagggatacttcaggttttaaaaattggacattttcaacagttgctcattgggatgaaaacgcagttggtgaatggaaaattaaagtttataatgttgaagctgaaaattcaatttcctttgatggttggcaaatgcgtctgtttggtgaatgtataaatcctgaacttgctaaaagatttgaattaaatgaagattatagtgttattaatgatgaagataatgaagataatgaagataatgataataatgaaaccgaaaccgagtcaagtacagcatctgaaacttcaacaacatcaattgaatcatcaaccacaaatacaattgacacgcctacaactgaagtagttgaatcaacatcagcaactggagaaatcactacaactgaaaatgtgcagccaactacaactactgaagaatcgacaccaactacatcattaagttcaagtataccaacatctgatgatcaacaaaagggtaatggtaatgatagttatgaaaatcctgataaatcaacacattttattggttatttctttgcattattagttgttggatttggtattctgctatacataatattaacaagaagaaagccaggaagagcacgtcgtagagaagattttgaatttgatattatacgtcctgatgacgatgatagtagatttgaatttgatgatgatgacgatgacgatgatgatgatgatgaatttaacgtaagcgattttgataacgataataatgatattaattcaaaacctttacaaaattctaagaatgataattttaaattagattcatcatctgaatttgatcttggtagttcaaatttaaaaggtcatgaaacatcagataaaattatcaaagatgttattaatcatgaaactaatacccctaaaagtaaagatgaagattattcaaatgaacgcacgggacttataaatgataacgatgatgaattatcatcatcatcatcgcataataataaggataataatcaagatgatgatagactgattctttagtttgatctttatataaacaaacactatatagtatttcaaaaacttaaattttgatagattaaagaaagaccttccctaattctgtatccatgaatttttcactctcacgcattataacgatttttatttcggaatctgtctctttttcttgagccatagacaacgatggtatcaccaactccaaaaccaacaccaccacaaccgagaataaaaaaacaattaaatactaatccaacatcacaaccaaaacttgaaaaagaaactcctaaaattgattcaaaaccaactaatggtaaattatcactttatagtcgttataatgcattaccatttaaattaaaattgtacttatggattacgactgctggtgttgcttggttagcagatagtgttagtgatagaatatttgaacaaaatatgattgaagaggaagctaatagacgtgtagaaatggaaattcgtaaaatgaaagaagctgaaatattacttaatagtagtaaaaagtaatttttataaataaagtcatcattcctttcatgtaaataagttgtatattataactaaaattttaaaattcagatactactttttttttttaattaactgattaaagattataaatataaataactggaaatacagattaagcggggaaataaaaatcattaaaggcaaagacaatagaaaaataaaataaaataagaaaatcattaacattaattctttttcaatgaagaaacaaattctaaaaatttagctgggtttgcatcaatacctctagtgtaaacaaattcagatgctaattttgttgcaaatatagcctttaaataagcttcaggaactcttgtcaaaacattttctaaaccaatttcatttaataataattttggtaatgcactctttaaaacagtattacggaattcaatatcatctgaccataattcctttgatgatgaaagttcatcacctaatttattaattgcaagtgataattcatcagataaatcagcaaattttttattagtttcatctcttaatttccataacatattaaattcattttctgcatttctaataataattgattggacttccttaacataattttgataaaatgttggtaatgttttagtttttggatccatacacatctttgattgaaattcttcatcacttaatgataatgcagctaaaacttctaatgaagaagatgtaacaccacctttattagttgaagcatcctttaaaacaattgcacctgcatcttctaaaatatatttagcagcttgagtaataaaaagatttgcaccttcaataataattggaataatagatttaccagttttaggatctaataatgaattaacagttgaaacatcaattgaatttggtctaccaccacatggagtccataggttgataaaatcttttggataaatattttgtaaatttaaatggaattgatttctaaattgaataccattatgaacaatttgaccatttggtaatttaagatctttatcattaactaaaacaatataaccctttggacctaattttgatttatcaaattgattattaccatatctgttattagctaatcttaataattcatccttgtcaataccatcttcatcaacaatacaaccaaaaccatcaacaataccaatatatttttcatctcctgataatttgatttcatttgaacctaaatcaccatcaccaccacccatttgtaattttttgacagttgaccaatcattaatatttaattttttataaacaccttcagtaaatgctctaacacttaaagtggtcataccatattcatcatgtggaataccaccaatttcaggagatttaccagtaaagaaagctttccaagggaaaccaaattttgcacctctctttttagcatgtaaagttgcccaatcaacaaaaccagcagtattttcatcaggacccatatataacatttcaggtttattatataaatcaacaattttttcctttgaaggatcatttaaaattaacaaatctaataatgaatcaatatatttaacaaaacattccttcttttgagtttgagcagaaccactattaattaaaataacaccctttgaaccaccttctggaatatctttatttttcttctgttgagttgaagctaaattataattttcatcaaacattgttctcatatttttcaaatagaaatcatcattatttgataagacaattctaataccacctcttgcaacatctctaaatctaatatggaaacctctaaattctgaaccaacaacgaaaaacataccaaaaggttgatttggatattctgattctggtaaaaattttgatgcatcaagtctaaatgagatagcaacttttgaagtaatgaaaaaattagttttcaaaattgatttattgaaagcatataaaactcttaaaacagtttgataattataattattaacatcatttaaagttgaattaaaatgttcatcattttcaataccattaattttagaagttctttgataagataaagttttgattaaatttgattttgaagtataatgaatatcaacaaaatttttatataattgttgaattaattttaaatttgaattaaaagtttcaataataaaagtttcagtaaaagtttcagaattgaatctttccttaatcttattaactaattcaacagtctttggtgtaacatttgaagaatttaataataattttttcaaagattgatattcaggacctaatctatttaagaaatgagtgatgaaaataacaccacaatgagcataaatacattcttgaattgaccaaataccagattcgaaatttgaatagaatttattatcagggatacaatataataatgaagcatctttagtaatttgtaatgaagttaaacttgagtctagttcaatatttgaattaatatctaaatacattgaaataattgtataattatttttaaaattttcaacatattttctctttaaattaattttataataagaggctaaagttgataaagctgaattatatctatgggaagtaccagtcttataaccaataataattcttaattcattagtttcagataaagtataatgtttaacaactggaccttcagttaaattagattcatctaaaatttcagaatataaagttttagtatgattagttgcaattttagagaaagttgaatctgagattgaatcaattgaactagatgaatcatcgtcactagttgaagaaaaatctgatttataaacgaaataacattttaaagtttcaccatttgataaaattgaattaaaggattctaatctatatgaagaatttttattatctaagaataaatcatcaatttccttttcaaaaatattagaatcaccagattcaaaataaaccgcatttgaatcatcattaatttttttaaaatgaatatcagttgaaccattaattttagcattaattttagctgaataaagggataaaacatttgaagcaatattatcaattgaatcagatgagaaataagtatcattaatacctaaatcattataaaaagattcaacttcagattcaattaaattttcagggattaaaccaaaagaatctaatttatccataactaaatttttttgatgatcctttgatttaaatggtgaagctatataaccattattagtaatttcatcttttgaaaggttttggaatgaagattcagagaaattgttatccaaagttaaactttgaatagctggaattgcagcagacatttggatttgattggtatttgattaataaaagagaaaaggtaaaatagtgattaataagataaaatattaatataataaataaattgaataaaagatttgaagatgataaaactaagggggaattgaacagccttttaaagtaaaaccagttaaagtaatgagtaataataattgccaccacaattgtcaaaataatatctgatatattctaattataattataattttaataatgagcctttaatgggccttattgccctagggcaaaatgtttaaaatttcatgttaatataatatgtcttacctaatacagtaatagcgcctattattaacttgatttatcccccctattattgtttattgtttaccgctgttaaccgccattagtttaaaatcaaatgacttgtaagcaatttaaacttttatcaattccgattaattattatccaataatctactctcatttatctttaaatttgcaactcgtaccgagtataacctttgatatccctatattgtatgttttttcaaatttattaattcctcatctcgcaataaattagccgctaagtcttggaaagtattcggcattgatctccgtaatatcagtctttattgtctttattgtctttattatcgttattattattattttaattttaattccctcaatgtaaacaatctttccgcaattttttaattgacttgccctgataactgctccatatcttgtttatattatttgcatgtgaaaatttgtcagtaacttgaaaaaaaaatttggatgacttccccccccccccccccccctctctctcttgtggattcagagagagtttttgtccatttatacaagtaattaattgtgattaattttaaagtaaaagtaaagctactatactaaaagttttaaataagtgtatttatatttttaatctgttatctatatcatgattaccaatttatttacacattagttagttcatagttatattgattatatatactactaattattaaatgtgtaaaataggtgaagaaagaattaaatctaaatgaaaatgaagaacggaaaaagaaaagaaagatgcaagtgaaaagatatatagaatcaattctgtatctgagtcatagtcatacagtaaagtaaagtaaaagttgattatgtcagcacttcgcgatatttttcaattttttcaattttcgcgtttcttttctttttcatttttttatttttaaaaaaaaaaaaaaaaaaaatatttttattttcatttcgatttcaattcctgtacctgaaactgttcacgttagatttttattgatcccagtttcttattgttttttattaatattgtgaatcttcctgtatttactatttattatttattatattcatctcattccttcacataaaacaaataatggtaaatctacccacattcaataataataaatcaaattcaaatagtgattcaattcaaaaaaatcgtaataataattcactcccttttaatataataataattgcaacaattacaattaatgcaatagcttggattattgcatttgcaggttcaattgctgcctctcaaacaattgatttctttcctaaatttacttggtgggggttagttttcgaattatttattgttattggtttaccagtattatatttcttaaatttattacatcaatatcatcaatttttattatcaattttaacaattgcttttatttatacttcaaattcaactaataatttggtttattatacagattcttcatcatcagctgctggtactggatttatcttattaagtatggtaaatttcttatggttactctacttaggttctgataaacaatctccacctattaaatttattgatagtttcgatgataaatcaactcaaactaattataacaataataataataataattataataataataaaagagtttcatcatttagaaatacaagaggtaactcatattcttatggggctggtaatcaatcaactgtcaaacttaataataataatgttcatgaattagaaggttttgaaaatcgtgttaattcaaatactttatcagaagatttagaattcaatgattctgcttacagacaaagtggtataataaatttaaatcctccacaaattgatcgttcaaatacaattaatgataatgaaggtactaattttacaggtatttcatcagttactaattatatggaaaattatccaattttagtacgtagtttatatgattataatgcaaatcctgaagatgttaatgaattatcattcaaaaagggtgaagttttcagagttaaaaatactaacggtaattggtggcaagctaaaaataaaaatggtgaaattggtatgtgtccaagtaactatcttgaaattgtcacttaattatctctatctctatctctcatatcattatatgtatacattttgtataagttataataactgtataatatagaaacagctcttatcttatcacccctcggaaaattcagacttttttttgcaaacatgaaaatttccttccttgttcatttttccgagattcccttttttctggcgctgggttataaactattccttataatgtaaacaaacacaaaacactggctcttcctgaggaattcttttaattcccttacttcatcttcccattggcaattttcatcattaaaatgatgaatacggggatttctaaacaactcccgtcttctgcttcaaataattcttctttaactaaagttaattcaaaattttataatgaaaaatatttaaataatcaaaataatgttcaaaataataataatcaaaataacattataattgatgatattaatgaaaatatgatatgtccaccagtattatcaccttatgcattatctgttttagaggataaactaaatatgaatttgaaaaataaaactaaaacaaacttgaataattctaaaataataaaatctgaaagaaataataattcttcaattttaaatgatgtaacatcatcaaaaaccaatactcaaacaaatataacaacttctaaaactcaaatatctagacattcaagctttatgaagaaattaggtctaggtgcaccacgacggttaactgatgatggatttaaaagcttttcaaataaattagaatcaaattcaattgggaatgaaaatgaaaacataaacatagacaccaatccagcaagaattgcaagtaattccccaatggcaatttcaaatttgagagtaccaacaagaacggaaattgttcatgattcaaaagaagagaatgaaaagaaaagattgttgcaatcaaccccaggcgtttattctccaatacataaacgtcatagtataacgttaactgaaaaggcaaatgaaccaatcaaacctaataatgtaataacaactccgattaaagacaatctttttgaaattgatgttgattcaccagagatgggacgacgttcaatttcagaaaagaaaataactcataatacaactgattttcaatctttatttgaaatcaatcaagataaatttgttttaaacttggatagtgataaatttgcaacaaatactaatactaataccaataatagcaaagaaaatgattttaataaaaaacctacaagttttgatcatgttcaaatactattagataaaaagaaagaaatttatgcattaaggaaagaaattaaacagtataaggaaactattcttaatcaagcaaaggaaaatatagaaagtaaaaaatcattggaattattgaaaaaaaatgcacagaatgaaactaaaccaatcaattcaaataatccaaatactgaagaaaataaagtaatacaagttaataaacattcatttaagatattagaacaaattggtaaaggtggttcatcaaaagtttatagagcatcatcactcgaatcgagtaatagatattttgcaattaaagtagtcaatttagatgatcatgaattatcaacagttgaagaattaaagggtgaaattagaattttgcataaattaagacattgttcaagagttgttagattactggactactcattaactagtaaatttattcattttgttatggaatgtggtgaacttgatttagcaacagttttatcaacaagacattcattcccaaaattttatgattcagaatttgttagatatcatgcaagagaaatgattaaatgtattgatgttatacataaattagatgttgttcatttagatttaaaacctgcgaattttgtttttgtttcaggtgttttaaaattaattgattttggtataagtaactcaattaaaagtcatacagttaatgtttatagagaatttcaaatgggtacaccaaattatatggcacctgagacattgatagattttgcagaaaatgaagcaggatcgacaatttggaaagttggtagacctgcagatatatggtcattaggttgtatattatatcaattaacttatggaattacaccatatgcaaattacacaggtacaaaaaagattctagctataacaaatccatcaattcgtatatcgtatcccactaatgcggttaacttaagaaagaaaaataaagaaaatgatgaacttaataataataacaataacaataatgaaactaatgatgaagatactgataatgaaaaagtttgtccttatttgattgatatgattaaatcatgtttagttcgagatccaagtaaaagaattacaagtgaagaattactgaatcatatttttgttaaacccgttattattgataaaactgttcttaaagaagttgtaagagggtgtgttggatttggtagtagacatccagaaatgaaagatataaatgtatcaacatcaagtaaatttactccaaataaagaaaatttaaaatctcaggagagactcaacaaactaattgatggagtttggaaaagggttagtgaagattgatttcggcgtcaaaagagaatttaaaagtttctccgattgtaatattagaatgatagaattgtgtaactttaaataattattaacgaaaataatataccactaaatttacatgtaatctataatcaaaatgattgaactaggatataacgttatacgggtaatttttaataaataagatgtgaaagtagaaaattgtaaaaaaacataaacataaaataaatgtatctgatgataatgataatagaataattataattaattaacgaggacccaatttatctaaaactcttggaccttgttcttcccattcttgtttcgatatccacatatgatctttatctgccataatattagctaaaactgcaccacctataaaaaccatatgttttcttcttggaggatcctcaattctaactttaaatttatctaatctagttggatcaccctttagtactttaacaaaccattgttgttttaattctttctctaatcttgaaggtaaaccaggatacattgatgaaccacctgataaaacaattgatttatataaagttgaccttacatcaacatcacatgattgaattacattaaataatgtttcaccaacacctggttgttcaatatcaactaatgaaggttggaataaacattcaggtgcttcaaatctttcactaccaatttttataactctaccatcaggtaattcaaaattactaactaatgtagttgtctcatttgctaattttgtatcaaaatctaaatcatatgatgcataacataattgttccttaatttgtctaacagtatcaaaatctgctgttctattaaatgcataacctcttcttaataataaattaattaaatttcttgtaacatctctacctgcaacatctaatcttctagtttgatgatttaaaacgactgattcataaactggaacaatatgtgtaacaccatcacctgaatcaacaacaacacctgatgataaaccttgcgcatataatgctaaaactgcttgaattgcaacataaactccaccaaattgatatttttcaaacataacatcacacattgtttccctattcttcaatggattcattggtggttcagttaataaaattttacgaccttgtggatttattttcatacgttcataaaatgcataatcccataaatgttccatatcttcccaatttttaataataccattttccattggatatgaaatttgtaacatacttctaacagctgctgcttcatcaccacacataatatctttaatttcaacatcacccattgctctttcttcagctctcaatattggacgtccaaccattgatgggaatgtatgatctgggaaattagttcccgcccttccaattttaacaaacccagtaccttgatctaacacaattggatccattgctcttacaattgttcttatttacctctaagacaaactttacctaaatttgtaaacttattaatgcatgtacgccttcatctctttcaatctcgcttttctacatgtttttccacaaaaaagggcggtgtggaaatatcaattgcgtctatgcgtctatacatgcaaccttatctactatgcatgtttataagttgtatattatggtttactgtaggatatgatattattctataaacaacgtatacaggaaagtaataggtgcatttaacctaacattgatctcttacgaccacgtagtctgactgctgcaagtcttctttcaacatctctccaagcattaattttctttttctctgaatataatgaatgataaccttccaataaccattcattatataattcagagaattgtggatgtgtggaaactagtgcacgttcaagaacgtaaatatcaacagctttatcctctactaaatttgaataacttgataatccaaaatcaattaatgcaactgaatatttttcttcagtttctgattctttaactaatacaatatttgaacttgttaaatcaccatgtacaatttcattgagatgtaattcagcgattgcataaccaactaatctcataacatctttagctaattgaccaattgcttcactttcacctttcttttcgataaaccataaccaattttttaaactactaaaatcaccattgggtaatctgaatcctaaaaattccatccatattataccattaattgcatctaatgctataagttttggtgctttaatattaagtgaatctaatttatataataattttgcttcaccagctgttctactcttagtaatctgtaaatctaattgttcatgtctatatggtttacgcggacgatatttaacaatataattattgacatttgttaaacctgctggtttaatatcttttggtaaatatggatgtttctcagtaacgaaaactaatgcctctgcaccttgtgaaactaatttcaattcaaaatctggtagtattttctcaactctctctattatctctttactcatgctatattgttctataaagtgtatataaaggaagtctgtaaaaaataaagttttcattaacagtgtcaaaaattgtcagcatgaatttcaatttccaatcaaaaaaaatttatgtcccgaaaaggaaatttttgttaaattaaaaactgagacacgacttttattcatttaccttaaatcaaaacattgacgaatacgcacgttaaataatgtcaactatatccgaaattacgggatctactactcctaactatgattcgcttaatacacctacctctgaaacaccaattcaaaatacaatgcataaattaaccactgataatttaaaactaccatttgaaacaccatatcaagaatacgagaaatttatatcaaatgaagtattaaataaatcaccaataaaggagacgaatgagtcaaatgtaactacctctccacataccccacaacaacagaaaatggatgaaattaataattttaatgatcctaataaatttttaaaacatttagataatattaaacatttagagaatagacttaattatagatttttagaactggaagcaaaattaagatttttaagattattaacagcaggtactgatatttcatcaagtgatttaacatcggttgatattgattctgaacaactacaaaataaacttaattcattattaacacaagttgaagaattaaagaagattggtaaaacattaagaaaaaagattggtaaatgtttccatcaagcagaagttcgacgttgtattgagggtaaacatgtattacaagatgaaattgatatgatgactgaagaaatacgaaattatcaaacatttttccaatctaatggattaaataacaattttaataatgataataataatgatgttattgaatgggctaaaaggttagagagtgagaaaatattaggtggtgaagaatttttggagaataatttattaaaattaagtgaagagattgaagaattgggtaaatcattaacagatattgagaaaacatttagtaatgtaaatgaagaggaagaacaactagatgaagaaattattgaacttgaaagagaaaagaggaggttggagaataaatataaggaattatcatctcatgaaatgacggaggcggatgttaagctaatcaatgaacaaaaggtacttgaacagctggtaagtatctgggagtcattttaaaaaagtatttccattgatattagattaaaaaataggagtagagggatatataatatatgtagcaaaaggataggaaaaaaactttataaatatatgatgtcgtagaaagaagagaaggtaaattattcatttcgacgcattaagaaagcgcccattgcaccaagataaccttcatgatttaagaaataagctttcttttcaccatttgaccaaaaatttattgcaaaacttaaagttcgtatagtttgattatgatttcgtatataagaaccagcaaaataaattttctttaaattataacgttgagcttgtaaataagcaatttgtccaatattatatgaaactgcatataataaagaacgagcaatatctttttgattaaatttatttaatctttcaacacgagatagtttagtttcatcatttttatcatttttatcaataacttctttaaatactttacccattgaagaggctatatgatttgattttaaaccaattttatcatatgacataccataaatatcaccaactaataaatcaacattttcattattaccatttgatgccatttctaacatttcatcaaaactattacaatcggttaaaattgataaaagcccccataatgtaccaccacctaatgatgaacctccaactctttcaaaattcccctcatttggacctgtaactctaatcattgaaacacctgatccaatatttactaataaatatgggtaaactgaagaaatcaattgatttgaatcattcgactctattgtttcattgaatgattcattttcacaatcaatttcaacatatttattattaacatcatcataataaaagatttcatttttgataccagtaatgaaaaaatccatacctattattaaacattgcatttcatcctctttttgaattttacaatttagataacttaattcatttgttaacatattataatatttatgggatccaccaccagttgcaattaaagttatttgatatttattattattcacctgtattaattccgttattgtctttttaataaattctatgaattgagaaattttatcagtttcaattttataaaaattaattctaacaccattatttaattttgaatcttttgtaaaataaaccattttagctaatgaaccaccaatatcaattgaaatttcatttatatcattaataaaatgatttggtaatgatatatcatttgcatcaggtaaattatcaaattcatattcatttaaattattcactatatgggcatttgaaacatttaaaggtttttgattatgacaatgattatgacgataaatactattctgtcgagatgaaacattagatgatacatttgatgatacatttgatgatatagttgaagatatagttgaatttgttgaatttgttaaagttttcaaattattaatactatcgacattatgactatcaatatttggaatgttttcgtttaaagacattgaacttaaattcttgtctaaattatgaatatttattagattttcttcgttattattatttgattgattattaattatatgagaattttcaatgattgaatgattaaacgtcatgtattttaattatgagtatattttatatagctctttgcagtaatgaattattatcaaaaataataatatcctataccgtagatcctaaatcctatgaaatataaaatatgacagtattgagccttttaataatgcttttaaatgagccccaccttccagtgcaatgtgttagtaatccaacgaattatagtgttagactcgttccgacagtgttgagctctcaaattggaaaattgatgggaaaaaaaattatgttgttggtggaaattttactttccccagtggctgcaggggcagaggggaggggcgtggagttcaccgggggagtattaacggtccaagtcattttcttccatggaggaagggaaacaacaagggtcttgaatgtggcggtgcgcttgctttaagcggatttacggcgcatggcttttacttcttaatgtctttcctacaaattactggatgaataatagaagatcatatagtatttcatttatctgttcattatatatcgaaggtaaattagtgtttatacaaagtttaattaccaaaatatttgtcataaccagtcaagacaaatctgaatttaacatcacccttggtcattctttcccaagcagttttaacatttgcttcattaatatctaaagtttcaatcattggtttaatatcattctttgctgcaacttctaacatatattcaatatcttttggtgaaccaattgctgaaccaccaactgaaatgttattcagtaacatttggaatggtgtaagagttaacttatcagtaattggaggtgcagtaatgaaaatcatttgaccatatggtgcaagtaaattcaaaactgaatctattgctgtttcactgaatgatgatgcagtattgattaataaatcaagtgaatcttcatatttagttgcaaaatcttcttcatctgttgcaatgaaatgatctgcacctaatgataatgctaattccttctttttatcgttacgtgaaattgcggtaacttctgcacctaatgccttggcaaataaaattgccatatgaccaataccaccgataccattgataccaactttagtacctttcttaacaccatatgtcatcattggtctgaatgctgtaataccaccacataataatggtgcaacataatttgaatccattgattctggaattttgaatgcaaattcagagttaacacgaacatgtgatgcataaccaccttgtgaatgtttaccagttgctctataagtaccaccatatgtaccaaccatttttttacaattattttgattaccgttttcacaacgtttacatgtatgacatgaatcacattgagcaccaacaccaactctgtcaccgaccttgaatctagcatttggacctgcagcggtaactctaccaacaatttcatgaccaactgcaagtggagcgtaaggctcaccccaatcaccattagctgcatgaatatctgaaccacaaataccacatgcttcaattttaatttcaacatcattatcacgtaaatcttgtggttcgtatgtgaattcctttggatttaaccaatccttgtaatcaataacaccaattgctctgaatgaagtagacatcttttttactatttgcttgtttaattaaggtaaaggaaagaaaaaagaagaagtaattggaaggtggacaaaaaacaagaaaattagcaagcttaaataagcttttttaacgcttccggtcccacaaaacgtttcggaccgataagtgatgattcaaggagttaaaccctaatttccttttcttctagtagattctcgctaacattgcctcaaagggaagtggaaaagtttaagcgagacattgttgctctgccctgcattaataatcattttgaattaatccgtggagattagatttttttatcatatctcatgtctaatacgttgatataaaaaataatatattagaataataaagaaaaacgtatatataggatataaaaatataatgtatgatagataaataactaaatttaattatataaaactaattgacataacaataaaaacatttatagtattagaatagtaaaattatatttacttaccattctaatccaccttgttcagcaggatttgaacccatacattcaatacctgcacaaattttttcaagttcttcagcatcagcattttgctttgcagttaatgcagctggattaataattgaaccattttcttgttctaatgcataatgttttttaaccatatctctaactataccttgataatataaaactcctctttcctttaatggatgtaaataacctgtattataaataccattattaagatttttttgagttgcttcacataagttaaaatcttcaagctcaacttgttgtaagaaatcaacaaattctttcttttgttcttcagttgcacctttctttgcataaatatcatattgtaaaattgttctctttgcactaattggtaaaactctaattgaataccaagctggtgaataacaattaataccattagttgggaataaataacaccataatccattaaattgtccaccaggatttgctttcttttgaactttttcagttgcttgtttctttttaccaaatccaaaccatgaactttcttgatcaggatctgcattatcttcaataattggaatttcttcttgaacaatttttgcataatgtctacaataattaccctttggaacaactttataagtttccattttaaaggcttgatttaaacctggatgagcagttggacaatgataacattcttgataaccatccattaaagttttccaattaaattgaccatctaattcatatgacatatgatattcataatcatcaaaatcaaattcatccatttcattttctaaacctgcaaaaaattcttcaaatggtgtaaaattttcagtattatcaaaattaacgaaaactaaaccttgtcttgatgtatgtgtcttaatttcatataatgaatttgctgtaggatcaaatccttcaatattttcaaaatgtggtgcctttttcaataaaccatttgtatcatatgaccaaccatgatatttacaacctaaaatagttgatgaaccttgttgctttctaacaactgggaatgctctatgtctacaaatattatgaaatgctttaatttcaccttcctttgttttaataaggaaaaaattccaaccaaggaaattaaatgcaaaataatcacctgctttagtaaatcttgatttatgaagacagaataaccaagattttgcaaaaattgctcttttttcaaaatctaaaactttatcactgatccaccatgaagctggtaatgtatgaacacctggtaataatttatcagattctaaatctggtggtggagctgatggttgtgctgattcaactgctactgacattgctaatatatttttatttgcttttgtttatttgctttgttgaaaaaaaaatgtcaggaagtatctagtaatctaattcaaagtaactagatgacataccatcagttatttatacaccaagaaatcaacacatacttaaaacatacatccaaatagtcagccagatgtcagaaaacaagttaccatatcaggcagtttcttaatattatgctaatcttatctaatcaataatactatcaaatttttcacatcaagcatcacatcacatccaatctccagataacccttatcaatataaaatttaaatttcggagaaagttctttcctaaaagggaattcctgtccactgtgttacgtaatgcaccttaacgtaatattacttactaaaagaagaactactacttgtctagagtaatgaatggctgatgcacttgatgttacactgtagtagttattaatatgtcaatgtcgtcttaactcttttgaatgatgaaaatatagaccatgattaacccatggaagaaaactgtaaaactgtccgattcaattcaactcaatcctcgtaaattatgtattttgtgaaagcattttttttacagtgaagagggggggggtttgaatttaatattattttctagaccatgggaacaattattaatttgatccgtaataagttactatgagttgtagaatcgtccttaaactacacatatcctatattcttatctacaaataattacttagagaataagtacattatttatctatttatttgaaaatcgatgtcagaaatacccattttattcagtaaccaactagtacctgaaaagggaacgtttaaaattaaaattgctgtcaaaaatgaacaaacttcacaagatttcaaaatacgatcaacacttttacatgatttactaaaatcctcaatcatatttgatataagtcaaataactgaaaatgataatttatggttcaatattagattggtaaatttaccatcaatcaaaaggctgaaacttaaaaatgaaactatcaattttactatttccattcttgattctgatgatcaacaaaatattccattctctgtgtctcttttgaatctatttcaactagctacggggcatgttaatgaaattagtaaatcaatttcaaattatttattagatattaattttacaaattcaattgatgataattatattcatgaattatcattatatttatcaagtttagataacgttagtaatactttaagtaatgttaaagtagattattcagatgcaagttctattaattctgaaatatctaataattcatcaatattcccagttgattcattacgatcgacacaatctaatacttcattatcatcaatgaaaaaaagtacaaaatcattaacaaaatcattatttaaaatgaatagacacaaaaatacagtcttatatcccaattcaaattttagctcaaattcaaattcaaatataaatttgaattcaacatctgagttatcattgaataataattccagttccacttcaaaatcaaatttaagatcgtcatatgcttcaccagttagtcaattacaatcagattcctcattaagtcttaatatatccaatacaaatcctgataaatatcatgatgatactgatggatttttgatattacaaattgaatcagctacaggattaccaccatttagaaatacaactcatttaggttatgatatggatccatttgttgtcgtttcatttagtaaacaaattttcaaaacatctgtttgtagacatgcattaaatccatcttggaaaaatcaattaattaatttaaggattagtaaatattcatttaattttaaattaaaattatcagtttatgattttgattattttacttataatgatgatatttgttcaggtgttattcaaattgatgatttaattaatgaatcagaaattaattatatgaatttatggacatacaagaaaattccattaatattttcaaatgaatcactaatgaagaaaactagtgttaaattagaggattatcaaccggaattatcaattaggtttaaatatatcaaattagaaactttgtttaaatataattccaaatttaatccaatgaaggaaaaatgtccgaattgtaataaaatagacaaaacaaatagatcagcattacaacatctatctatatgtacaaatgatttaacaccaaaacaatttattcataaacactttattacatccaataatgcatctcgtagatggtatagtaaaatattggcacatatagcatatggtagattaacagttggtggtaataatgcgcatatattagttcaagatagagaaactggattaatattagaagaaaaaatatcagcatttgttaaattaggtattagattattatataaatcagttaaatcagataattcaagtgaaaaaattaaaagaatgttacgtacattatcaattaaacaaggttcaagatatgataaagcagaatcaaaaaataaaattgcaggatttgttaaatttcatggattaagttcaacgatgcaagaatgtttaatttcagatattaaaagttataacactttcaatgaatttttcagtagaaaattaaaacctggtgcaagaccaatcgaaggtggtatggataataaaattattgtatcagttgcagattcaagattaattgttttcaataatattaataatgcgaaaaatctgtggattaaaggtaaaggatttacaattggtaaattacttgatagagaaattgattctagtctagattattcagttggtattttccgtttagcaccacaagattatcatagagttcattgtccacttaatggtactgttattaaaattaatcatattcatggatcatattatacagttaatccaatggcgattagatcatcacttgatgttttcggtgataatatacgtacaattataacattacgtacaattgaatatggagatgttgaaattatattagttggagcaatgatggttggtagtattttaattacagctgaattaaataaggaaattaaaaaaggacaagaaattggatattttaaatttggtggatcaacagttatattagttttcaataataatgctaataaagataatgagaagtatcaaaccattgaatgggatggggatttaatttctaattctaataaaaaattagaaaccttagttaaagttggtatgagtgttggacattcaactggagttgaaggttttaaaagaggttttaaaaatgaagttagtgatgttgaaagaagggaagttattcgtagagttacaggtttgggagaaggatatggagttggagttagtatgggagataatattaaggcaaagattggtggtatgattgatgatgttatgagtgttagtggtattaaatcattcaatgaaaagaatggtaataataataatattgatgaattagttaaaaatgattgggaaatcaatgagttaactacattagatggaatcaatgattatgaatttggaaatgaggaagatttagagaataacgttgatattcaactgtttaattctgatgtctatggagaagttgatgatgttcatgaagattagctaatatgaaatattgtgtataaaatgtataactccgaactatgacataaattattgtcgcgctttttaagtatcaacttatcacattgtgatgatgggcaaaaccagtccttggtatttaagttatttgatatacgttactttatttgggagaatactactattttttatcttgtaactacaacaaaacaaaaatggttaaaattaacaaattaacagatatagactcaattgcaacttcattaggtgaattcattgtaacacaacaaaatgcagttttatcaacaaaggattcattctcagttgcagttagtggaggttcaatggttaatatactagcaaaggcattattagaaaataaatcaattgattggagtaaatgggttatatttttcagtgatgaaagattagttccattagatgatgaagattcaaattatggtgcattcaataaaacattattagaaccattagctcataaaggtacaattgggccaaaagttgtaacaattgatgaatcattattacatttaacagatactgcaaatgatagtaaaattgctgaaatttatgcagatgaaattccaaaagatggaattgatttagttttattaggttgtggacctgatggtcatacatgttcattattcccaaatcattcattattaaatgaagataaattaaatgttgcatcattaaatgattcaccaaaacctccaccaagaagaatcactttaacattaccatatttaaaaaaatgtggtacaattgcatttgttgcaactggttcaagtaaaaaggaagttttaaaagatatatttgctgatgatagctcattaccatgtgcattagttaataaattaccagttcatggaggtgtatgttggtttgttgatgaaagtgcaatggattagagtattaataaaggtggctcgttgatttaaaatttattaattttccgagaatccacatggaaaatttgaaaattgcgaggagaaaaaaatttaaaattttttaattttattattattgatactttaaccattaaaataaaatatcttttgtattagtatttatttttatataagacaatttgtaattaatataacaatggcacaaggtaatttaaaattagctaaaaagaagacacatcgtgtaacgaaacatcaaaaaaatcctaaagctgcagcaccaaaaatttataaagttaaaaatgttaccgcaaaggagaatcaagttcataaattagcaaaacaacatcaagcaaaacttgttggtaatacagaaaaattgattagtagtcgtgtgggtcatttagaaatgttaaaaggtgatcgtaggtcattagaaagagatgagagattgaagcaagaaaatgcaaagaaataaaaattgtctctctctttagatttagttgtgtaacctattataatttaacatatatatatatatatatattaaccatataaaccattttgatttgacttgaactaacttatgcatatatcaactattgttcaaatttagaggaaacatctttgataatctctttacgtagttcatcatgaagtgattttgaagaattgaaaaatgtcttttgtaaagtatttggcacaccatcatttttctctcttttcatctgtctctctctttggatagataatggaacttgtggtccttttgtcatagtatatattgattgatataattgtcttatatgataagaagaagttcgttctactgtataacttagacagtaatttcgcgacatgaaatttgtagcacagtataggaaatggaaaaaaatggctgcatcagattattttactataatgaatggtagagagttctttatcattaattcatctttctttaacttgtttcctttcttcatcagagcaatgagacttttagcaattgcagggttattgagtaccgttttaggtgatggttcagtattcaactttgtcaatgttggtcaatcacttgatatctcaacgcgagaagctacattaaatttagcaaatagttttggtatggcaaatgaatatgaaattgattcaaatattaatttaaataatatcatttttgataattctaatgtaattgttgttgttaaaggtgttgaagaaccaaaagaatttttctctaaatatgcaatttcaccagaatataatttcccaactggaaatagtgtaaaacaattattaaagaaaattccaagagatgaagataaattaagattaacaaataatattattatttctcaatcaatgtattatttacaaaaaatatggaaggataaagttgtaggtgttgaaagtgatttagctcaattggcttatttccttgaaaatgagaaaattaatgataaagttattgcatttatggaaccatctgattcacttgtaaaattacttgcagaaaatggtaaagctacagttgttgttttatcagataattatgaaaatactattaattttaataaaagagaattaaatccatcatcaaatgcagttttcacatcatcaactccaggttgttatgcaaatcaattagcatgtattgaagaaactgattcatgttcaggacatggtatttgtacattatcaggttcaggatcatcatgttatagatgtttatgttcatcaactgaagaaaatgatagaacaacttattggactggtaattcatgtgaaaaagttgattattcaggtccatttcatcttatcttttggacaagtattataattatacttcttggtgtttcaggtattaaattgttatcaagttgtggatcagaggaactacctggtgttttacaggctgcaacaatgcaaactaagaaaaatgtataatttagtatcaatcaatcaaatatataatatttaaactaaattaatcaatttaataagttatttacaatatttaataaaagaatgtatgaacccaccggcccttgcaattgtcattacatggacaaaagcaatgagcactaagacgattcgggataatcagtcccctcactctcgccagatgcatgacgccccaatccgtacagatgtcattatctacaagtagaaaaggtgacacagtcagggcaacacgtaaagcattggcttgccgcacgattatcctataagagaacttcatgaatactattaaaaggcatttacaagtgggatctccttccttttatacacgcgattttactttttacctctctgttaagtcctctttgagggttattcttcattatataagggggatgtattacttataggacaagatggatgtagtggtaaggtatgcatctggactgcctgatacaacagttcatgtagatgaagatgtttctgttcctcatgttttaagaaatgaaataagatctcaatatcctgatttatctcatagaaggttaaaattactttataatggtaggttattatcgactgatacaactattaaaaatttaaaatctccttgttatgttcattgtataattggtgatttactgtcagatgaagaaattgcacaagaaaatgatactcaacctcaaagacaaacaacaactgttcatggttttgatagattaactggattttcacaaaatgatattgctcaattacgtcaacaatttcatcaaatttatggtgaaaatgcaaatactgaaatggaagatgaatggattgattcagttgttggtccaaatggtgcaaatacagctccaattgctaataataatattaattcaactaataatccagaatctccattattaatgttactggcagtatctgttggatttgctcttggaggtttggctcttttattaatactgattgatgcaggtgggatctttggtaagagaactaagatagctgttattagtggtataattgtcaatatatcgtttgctatattgaaatctggtgtatgatatgaagtgtttacgtaatttaaggttgtgtttcttttttctgaatgtttaatgtttaagtttcctctgttctttgatctttgttctttgttctttgtttgtataatatatatcttatagtagatcggtttaatcatgtttggttggggtaagaaacctgcaaagaaagaatggaaagttaatgagaaggatccattagttactaaagttatagatgaaccaccgaaagatcgtcacgatagttatgaagatatagctcatgataatcatcaagaagtctatgataaagttgttaaacattttcaaaatactaaactttatcctattgcagaaggtgattgcccaaaggaaaaatatcttcctttaaatgatcacgaaaaattatggctttctaaacaatgtttccttagatatttacgtgcatgtaattggaatgaatcagataccattaaaagaattacaaattccattgcatggcgtagagaatttggtattgcaggtggtgaatttgataaagttacagctgatttagttgcagttgaaaatgaaactggtaaacatcaaattttcggttttgataattcaaatagaccttgtctgatgctttatactggtagacaaaatactaaagcatctgatagacaaattcaattgttgatttatatgattgaaagatgtattgaatttatgcctcaaggtcaagataaattgtgtttatgtgttgattttaaaaaatatcctgaagcttcaatttatgatccaattgttcctcctgttagtattggtaaatctattctttacatattgcaatatcattatcctgaacgtttaggtggtgcattatttattaatataccttcattagttaatatatttttgaaaatttgttggccattcgttgatccatatacaaagcaaaaatgtaaatttgatgaaccatttaagaattttattgatttaaatcaattacctgttaattatggtggtgaagttaattatgaatatgttcatgatgattactgggaagattttattgccaaatcagaaatcaagcgtaaacaaatgttagaaaactataacaaattaggttcacaaatcggtttatgtgaatgggaattaagaaatggaatatagctttataatttatacctttttaaaacttattttatttttctttattttatttatttgtacatataatatattaatataatataaaaatctctctttattttatatctatctaacaacctattttctcattaaaatgtataaagtttcttgttttaaagctcctaaatttctataattaccttctaaacacattaacaatccaccaaatgaacaataaactgaaattttattatctttaccttcttcaaatttataaactgtaccatgcataacataatcataatcatccattaaagatctttgatttgatttaagtggtctccaggaaccatttgcacctgtaagttcatcaccttccatattagaatcttctccgtctaataaaagagattttgcaagtgtaattgtaagtgtatcattttctgaaacggggaataattcatgatttatatctaaagtaattttagtttcttgtgatgatgttgaattagcaattattctactcacacgatcgtatcttgctgcatcaatactttcaacgttaaatatatcatcaaataatgtagaggacatgttttattattagtttattattataagattgatctatagtcccttaaaaagatcaaattaacttttcaatttatataagtgaagtaatttgaaaatagcaaaaaatcatgatgaaagaaaatttaaaaaaatttaaaattttgcaaactaagaaagtcgcgtctacacgggtttacgccattttaatctgtttcatgtttctatcagattatcactaacttgattatggcattaagatcaacacatgcatactctttcatttgataactaagacttatatctatcaatggctcgttcaaaatccaattccattaaactggataatgtcaatgttcattcagaggaatcattacctgaatttcaaatagatgatgaaacaacagatggatttaatatcgatgaagatgatgatgatattgatgatttagaactaggtaatcaacatcttgaatattaccccgatgcacatcgtcgtggacataccttattgggagataatgaagattttaaatataaacttcgtcgtatatacagaaatattcaaaaagaattaagtacaaaaaattcaaagaaattattagttggtttgggtattttcgtaattgcaattttattctttgcaattatgtttttcactggtaacggatctgatgcaaaacttccaggtggtgcaattcatgatcctaatgttaatcatcaatttgatgaagttggtgatggcaaagttcaaatgcctaataataataatgctcaaaatgataataatgatcaaacagatactgataccgataatggtaataatgatcaagatcaaacaacacctcaattagctaaaatgagcttagatgatatgagaaagggtaattattgggtttttgattatcaactgaatttcattgattttgatgaaggtgttggcgaatctgttgaaactgttaaaagagatcacgatgatgatcacgatgatgatgatgatgatcacgacgacgacgacgatgatgatgacgatgatgaacatgaaaataaaaagaaaggtggtaagaaggaccatgatgatgataaagatcatgttgacaaaggaaaaagtaaagaatctaattctgttgagacccaaaacgatgagccagagcaaaagcaaagtacaaatactgataaaggtttctacttacataatgttggttctgagttatggctcagacaaggggcagatcctgaattcaacagaaagataattgatctaaatagtctaacttataacggagtcgctttaaatccaacattaatatcagtcgctaaatcattagataagattattgtttattcagattctgttaaacaatggagacactcatcttatgctaaatactggcttgttgatgttaaatcattaagtgttgaaccagtttattacttatctaaaaaagataatggaattgaaactataatgcctgtgtcattaagctatgcagcttttacacctgataataactacatttatttcaattacgaaaataatttaatgttaagagatttgaaaactggtaaatttactaaagttactaaggatggatctctaaataaagtttccaatggtaaaccagattgggtatatgaagaagaagttttgggaagtgatagagcaatttattgggatactgaaggttctaaatttgcatttattcaatgggacgatgatgatgttccagtttataatttagaaattttcggtaatgatgagtatccaaagattgaaaaattaagatacccaaaaccaggtttcaaaaatcctaaagtatcattatatgtttacaatattgaaaaatctaaattaattaaagttaaacaaccagaacaagataaatcaaatgaaaccgttgaatcattaggtgatgattttattatttatcaaactgtctggttaaatgataatgaattattatttaagagaacagatagaactagtagaaaaattcaagtttgtgtttttaacttaaatgaaggtaaaacaactattgtaagatccattaatactgataaatataatggttggtataaaaacaatggtgatatatttgtacttccaaataacaatggttatattgatactgttgtttatgagaatcatgatcatttatcacatttcaagacttcaatggattccgagggtgatctattaacaggtggagaatgggatgtcattggtggtgtttcaggattcgatgaatctgataattcaatctattttattggtacggctggtaatgcattacaaagacaagtttataaagttggattaaatgattcatcattagttggtttaacaaaattaagtgatatccattcttattcattaaaagtttctagaggtggaaaatatgcagtaatgaagtatgcaggtcctggattaccaaccgaaaaaatagttgaattaagtaaattatctgaaggtccacaatattatgaaaatttggagaatttaaataatgcaaatagtgttgcaacaatcttagaaaactatagtataccaagtaaagaatataaatcatttacattacatgatggtgttaaagtcaatgttgttgaaattaagccagctaattttgatgaaaccaaaagttatccattattagtaagtgtttatggtggacctggaattcaaaaagttagttgtgatttcaattatggatttgaagaaattgttgcatcatcattagatgcggttgttttatatattgatccaagaggtacaggtggacttggatgggattatagatcatatgcgagaaataaaattggatattgggaaccaagagatattactgaaacaactgaaatgtatgcaaatgagaatgaatttattgatataagtaaaattggtgtttggggttggtcatatggtggatttacaacattgaaaacattagaatatgatcaaggacgagtatttaaatatggtatggcagttgcacctgtcactaattggaaattatatgattcaatttatactgaaagatatttaggtaatccagaaattgaagaaagttatcaagatgctaaaattgaaaatattaagagttttgaaaaattagatagatttttaattatgcatggtacagctgatgataatgttcattatcaaaataccttacaattgttaaatcaatttgatattaatggtattgagaattatgatgtgcatgttttcactgattccgatcactctattgcacatgataatgctaatactattgtttatgataaattattcagttggattgctgaagcatttggtaaataatttaaatcatataaaatataaaattctgtatatttacattaaaggaaagactttttcattaaatcatgaaagaaatgttatttttctgtataaaatcgttagtaaaagtgtttatagtataaaattgagacctcatttttgaggtcttgaatggttaacggtaccacaatgtttacaagttcttaaatctaaatctgcatcaaatttttcaattgcagatttaacttgagttcctaaatcatgacaatgaaaagcttcttcatgacaaacttctccacaacttttacaataccatctcattttatctaacattgattctggtctatcctgttctagcacaacacctacagtattagcaaatctaacaggactatgaggggtattggcaggtaaaaggaaagattcaccttccttgattgggatatcttgaaattttccatcattaacaacttttaaaagcatttcacctttaaattgataaaaccattcaggggtttgattaatatgataatcagttctttcatttgggccaccaacaatcattactgtaaaaccaccagtttgtaaacaataattattaacaggtggttttaatctatcaccattttctgcgatccatttttgaatatttattggggcacctaatggaactttagtatttaaagatacatggaatgatcttttaagtatagaagatctactaatacttgaagttctcaaactacctaatcccctgtataacataatgtcttgataaattgctattgatacaataaaatagtcttatatcaaaagaaccagatgaaataaatcgtttaaaaactggcataattaaacgttaaaacttaaaatgatgtgatttactagtagataataataataataattacgtaatgctttgtttacataaagttctgtccatgagtttctctatataacgtacttccattcggttgtctcacttgaaaaaaacgctagcaaaaaaaccaacttttgcatgccgcattttgtatgggagcgctaacaaaaactgcgaaaacggccaactacgacagatgcagtttttttctggatctgcaaaacctgcacttttggaacacttaactatacaacgcgatttccaactggtttttttcactttccaccaagtgagtttctctattaaaattttaaaaaatatccctaaatgtaaacaaagcaaatgttttcagtcgcgtcgttttgcttttttaggacatttgtttacattttaggaagggggctcaacactgacatgagtttcactattattactatgaaatattaattttattattattaagaagaatacgttagactaaacaaagtaaaaaaacaaaaaaacttataatatacagacaactttacctgatgcttttgaggtacttactctatgcaatgcaagatcatattgttcccatccacggaatataatatcaattggtgtatctaattcatctctttcccacatcttatgtaaaacatctttaaatgttacatcatatgataatttaaatgtataaattggaaattcaaaaacacctaatttatttaataaccaatatttcattgatatgtaagttgggaaaattaatgataataatttggttgaaaataaattcattgaattaactccatatattcttgtaaatgaaccattctcattgggtttcttaagaatcatattcaaatatttgtaataagaatcatttcttacacaatctaaaatcatatcaaatttaccattatttttaaccaattccaaaacttcattgatattctttaaatcaccctctgtataatcaattaaaacatctgcaccatttttttcaagtctttgctctgatcttaatgcacatgttacaacaattttattggctttcatatatttcttagcaatttcaactgcatatgatccaaccgatgtacctgctccaataatcaaaatattcttaccctttaatgcaccttctaaatcttggttactctttttaccctttaataatcctaactttaatgcaccataacctgtagcagctacacatgataatgatgctgcttgttcataaatcataccctttggtattttatcacagaaaatacttttctttggattaacaacaatatattgtgaaaatgtacctttaattgataacggatttaaaatatatccaaatactgaatctcctgattcataacctgattcgtcacctgctttgacaacaataccagaataatcaccacagaaaactttagtttttgcaccaatgaaaaatatacttaatctatgaagtaaaatatcaattggattaattgaaactgctttaactcgtagaagaatttcatttgatttaatattaactggaattggtatattagaaactgacaaattccaaaaacttgtataagtaagtgccttactgaatataattccatttgaaattgatttttcgtattcattgaaaatatctttatcacttaacatgtttatattttattgattctaataataacaatggttaaaaccaaataactattaaaacatcaaagaagcataataataaaatataaaacaaatcagtcagttaaaaaacaatatggctcttggtacctttttaaacttctacttaataacctctcaaacaacatgcattgtcattgccatttaacatcattaactgaaaaatcatgcaatttattttcatggagaaataaacttttgacgtattacgtaatgtttttcagaagaacatgaatatttttaaaattgatcaaatcagatcttctcaaaacttcattaactgatctttataaaataatcagccaatcatgagtatacgaccaacaataattaatgtgggtaagaagaaaatgtatatggtttctccattacgatgtttgtatccggaaaatggattaactgttgaaaaattgaagaaaatttgtccaaatgataaaaaatcatcgattttaacaatttatagaaatatcatgagaaatgtaaggtttttacagatacacacattttataagaaaactcttaaatcactgttgaaagttaaattaagacaagattattcatatagaagaaatataatattaagtacaagtttaccttcattaactgataatgaaatttatgaaagattgattaatactttaaattttatacataatgcaacattagatgacccggaaacgaataaaactgcacgtccaacaagtatggaatataagatattaaaatcaatattacaatatgaaatttcgaagaatttaccaaataatataaagaataatttaaaatctaaatttttaacaattgatgatttcgataaattaagaaaatcagagagagcattttatatgaataatgatattgcaagttataattcaatatggatgcaaggaaatagtggattattcaaaaatgaaatatgttttgattatttaaaggaacttcaaaatactgagttttctacatttgtagagaaaatggtttacgccaatttacattttgaaaaagttgtaataaaaatgaatgaagatgcattattacttctttgaagtaaatttatagtttaataaaaagttgtttagtataaagggtacttatagaattgaaatcgattggagggaaacaaaaaaagtatttaaaaatctaacaaaaagaattgaaaaaaatgagcataataatagcaactattgtcacaaaacaaaactaataaaattgtaatttgtaaaactgtaataacgaaagtgtaagtccatactaaaaatcaatatgacataaaatttgtttatttatttttctaaatttaccaacctaatgaacttttaacattgattggagcagaaatttcaggaatgtgtcttggtgtatcatctcttgttttaataacactgaaaatcattgagagtggattacttgacttagtattatatttagcatcttgagattcagaatcacttaatctaacatcaccaacagaatttgtatattctaatttcatttgatatttttcttcatcataaaattcagaactatcactaaatgatgaagtatcttcgttattttgaacatctgtatttgatgatttcttaaatcttctctttaataaataaataattgcaccgatataaataccaacaccagcaacacaaccgataacaataccaataatatattttttatcttttcttttaacagttgggattgttgatgctcttaatgcatgagaatccattgaacctaatgattggaaaatatcatcttgactttcaccgtttcctgaacttgattgtgaattacttgatgaaaatgccgctctattcaatgagtcaattaatccatcaattggaattttcggatcaatcaatgacgataatgtattgacagcagaattattactattgaaaatatcagatgatgaatctaaaacatagttttgtaaatcagcaatttttttagtatcaaaataaacttctgcaactgtaatcatataatcaacttcaattgatgaatatggaactaatttattaacaataacatccttagcattaacatcagggaatgcaccggacaaaacaattggtaaatattcaaaaatttgggcagatgataatgaattttgaacaataaaggcataatttaatggtttcttgaatccaattgaaataagtttataatctggaaaaacactaactgatgctgttggaataattgccttaggtaataatgtagtagttgcagttacagttgctgtattttgagttgtaacatctgtagtagctgaactttcagcaataataaaagttggaagccaagattctgtaactctaattatattacttgaagaagttgatgtatcggaatcgttcgttacagttggtgttgcaataactttagttgttgggacatggacagtattgtttggcgttgttgatgtgtttgctgcaactggtgcatcggattggcctgttggaacaacatcaggaccaacagtagaagaaatgagtgtattacctgaaacatatgaagtggttgaatcggttggcgtggtatcgatagtattttgtgtggtatctaattgagtagttgatacaatagtttgacttggagatgaaacaaaggtttcagattcggtagattcggtagattcagtaatgtgagttgcagtggttgcagtggttgcagtggttgcagcagttgcttcagttgattcggttgattcggttgattcagtagcagaagttgcttcagttactgaatatgattgagtaacttcggatggttctgatgaaattgttggtgcaactgttgataaagctgaagtttcagtagttgattcatataaaccagatgttgattcaataacaggtgtagttgtaacttctggaatttgggtagaaacagacggtgcaattggtagagttgttaaatcagaagataattgaggaatggttgaggcttcagtagcaaatgttgccgttgtgtctaaagttggtaatgatgtagttataccatcagttggtgcagcagatgtaagaggtaaagatgtagtgatatctgaaattggagcaattgtggtatcaggtaatgctgtgctgaatgttggaacaattgtggaaatatcaggtattggtgtagttgaagaagtataaatatcaggtcttggtgtagttgaagaagtataaatatcattagttgaggtatttggaattggtgctaaagttgttgtatcaggtgtatcagtagttgtatctgatggagttagtacagcaccggaggtaacagtagggtttggaagagaagttgtagtttgaattggtgtgtttgtagttggtgctgcgtcggtagtggtaactggtgaagaagttgcagtatctggtacatcatcagttgaatctgtagttgaagtaggtgatgtatcagtatttgtagttgaagtaggtaaagtatcagtacttgtagtcgtgtcaggatcatctgttgaagtatttaatgacaaagtaataggtgttccagatggtccataaactaaccgtgaagatgttgttaaagagtttgaggtgacatcagctaatgttgaagtatcgctagatgttgttgtaggagtagtagtatcaatagaagtagatattaaatcggcagtagttgaagtatctgaaggagataatgaaagtaagaaatttgttggaacaatagttgaatctgcagatgtggtagatgtagcatcagtagtatctgtaattgaggtggatgtagtatctttagtatctgtagtatctgtagttgaggtaggcgtaacatcggttgtatcagtagttgagataggtgtagcatcagtagtatcagtgtttgcggtagttgtagctgttgtgtcaccaaaagctgaaccaaaatcataactaatagtattaaaatctactgaagaaacagatgtaacaggatcttttggtgttgttgtaggagtattaaaactatattgaatagtattaaaatcaactggagcagtattaactggtgaacttgttactatagaatcatctgaaaatgctgatgtggttgtaggaagtgaagcggtagttaaaacaggtaatgagaatgggaatgagaatggtgatgatgtttcagatgatgttgttggagtttcaatatttgatgtagtatctattgaagtttctactgtaggttcatttgaagttgtggttggtattggaggtaaaactgtttgagctgttgaacttggaatctcatctgattgttcagttgtcgttggtatcaatgtaggttgttgttcttctgttgtagattgagatgtggtaacatatgcttcttgtgttattgatatagatgatgtagatgatgatgatgatgtggtagtagttgggccttcccaaaaaggattagttgtttcttgggtatctaaatttgtattttgagtagtagtttcaggttcatctgcagcagttgtatgaatttctaaatctgaagttgttgtaggtattgcagcattataacttggagcagcattagtatttgacaataataaaagtattgaaaatataacagtattaaataattgcatgattagttttttttcttctaaaaattaaaacaagaataggggtttaaatgagtgactatattctaaatgttttcttttttataaatttaatgattgtagaagttggtgatatgtctaatatctaatataagttataagttgtattatttacttgagagtttctctgataatgaaaactctttgtaaacttataaagtgatttttatatgaaacagtggtatcaaatgaggatgagttgatggcaattaggttatactaagggggggcactttccagatgagtaattagtgtaaccttttgagtaaatctaatgccaaagagataggcaagatgttgatcagatataatcaaaaaaataaatatcaagaaagcaagtagcaaaataaaagaaaatagtggatatagattggggttgggcctggatcgagagtaataaaatattgttacaataaaataataaaaataaaaataataaaattgtaaacaaaagagtgaaaatttgagaaaatttgagaaaattgagaaatttagtgaggaaaaggccgaaattttttttcagattttctccaaagagttaacagtggcaaatgttattacataataattgtttgtttatttaatctgtgtttgtctcttttattatactctttctctcttttgaagtatctacatagaatacagtatgtgtatacagatagattgggtaatatactaatagcaatactcaatgctaatagttattactagtaattaaccaataatataccaaatatcaatatttatatagtaccaatacaatataataaacgcgtacctgcgtcaacgcctacaattcctattataattcctattgtcctcagcgaaattatgaaacaatcactactattatggtactttcccctttgggaatattattatcttagctttttttcaacttattagaaaccgcgttttcccctgattatgtaagcgttgcgtcgatgggtcggtgtgtttgtgtgtctgtggtcccgtctgttttgtaaatagccatcatgattattattaatgattaagaataagtcttagttgataaacccacttgattgagtatccttttggacaaacagtaacttttaaacatgtcatctaatcaaattgatccctttggtgataacaatcttattgatgatgatttccaaatagatgatgatatcaataatcataatataaatgaatcatcatttatacaacctgatgtacaatcaaaaatcaataaacctcaatctcagtctcattcaataccttccattcaatcaaataaaacttatgaaggtggtttcttttccctaaattattatagacaatattttgatttaaatactaatcaatttttctcaaattgtctaaggacactgaatccaataagtgtacccaatgctgatgaatttaatcataatggtgatttatatggttctgtttggataactgcatctttaatattcttattgtttttctgtaattcatttgcaagtttattatctggctggtttttaggaattgatcttgattcattaaatataaattattttaaaatgattgtctcatctattaatttattatatgcttatacattaatcattccattgtttctctatttaatactaaaatattatcttaaagtattaattctagttccattaactaaattaatttcaatttattcttatgctaatttactttgggttccagcagttttattatcaatttttagaggtttattagtaaatttacatactttagattctcttttgaaatgggggtgtattctagttggtgctgtattaagtggttgctcaatcatttacaaactaaacttttacttcaattcaatatttggtaatgatgataaaaagtctgcttatataatattatcaatattagctatttgtcatttaggattctcaattggtgttaaagtttgcttctttggtaaactataatctaaatatttcaatatgttatatgtgtgtaatttattaatttaaaataaaaaccaaaaaatactaaagtaaagtaaattataaatgattttagaaaagatttctaaagttgacatttttcttatcagttagatcagcaaacctaatattattattataaaattacctgtacaataaccaattaaatatattacattaactgtaatttcctttgtatgacctgcaccactaaaacatgattaccaacaaatcatacctacaaacgctaacatacatgatgcaatcaataaaacaactataccagctatatattaatatttaataaggcttcctttaattgatgtaatttaaaatgtttattatcaaagccttggaatatgtaataaaatcataaatccaactgaaattgtcatacatttaacaacaataaataaaactttccatgcagccaattaataatcatttaaacaaattgctaaaacatatgcaaattacccatgattgtactaaatccattacacaaaaaccaaattgcagtttctgaaaattgcacatctgctttatactttagatctactttaataatcatgggccgttgcaaataatagatgtactattttccaaaaagatagtatcattaatcacatatagcggtccttgggtaggttgaacaaagtttaaacaacttgactttcatttaagttactttttagtcaaaactaactttataaaaataaagaaataaaattgtttttttctacaaccactaacctgaatggttttaaaattaaatatggtacttttcaatgtatttgtatatgccttatggttttagatctaaaaaattcaacgttttgatatggccgcaacttccatttgcagatttttttatttaactagacaacatcagatgcaacattcctaattttagaagagaaaagcacgagtagctcagtggtagagcagcagattgcaaatctgttggtcgctggttcaaacccggcctcgggcttttatttttaaattcttatcattttattaattttttgtatggtgacttctatcctcattaaaattattacctccgaaaagcatgtgctgccaaattattacctactttttgctatatttacactttgtttttgcattgctcttacctttttaatttacatgacttcttatcaaatagtatcattacttatatggcaacagagttaccactataactgttcagataattgagagataatcaactaataattaaacttttcaaacttatcaggcataaactttttctttaataacgataagaataacaacaataacaaacaacaacaacaaaaacattaaatgaaatacattgacgaatttgatattgacttagttaatgaggcattgtcctttaatacatcggatatgcatattcaaggtacctgtgatttatttacaactaaaccagtaggtgcagataggaaactttataaagtattagataaactctataatgcaaacgatgaagaaaacgaaacaaatggagattcaattaagcaagaacgccagaattctaattcttcaatacattctaatttatcatcaaaatcaattgatggattaaattcacaatttattcaacttaaaaataggtcattttcatattcttatactaaacctctaataatgatgaataatgaacaaaataatatgaaaagatcacattcatttcattcaccaactccagaacctgaaattattaatcaatatgaacatgattcaccatttggtccattaagtcaatcttcttcaagaaaattatttggttatttaattggtgcattgaattcaactttcccagatcatgatttttcaacaattcaaccagataatttcactttattaccatctaccgctgaattaattacaaaagtaaattcttatttaatttcatccggcaaatcatctggtttagattggatatggcaaacaattaatactcatatggaattagaacaatgtatttgtttccaatttgaacctcaacaatcatttcttgatgatttaggtgttatttggtcaaatatgtattttatatttaataaaaaaaagaaaagagttgcatttctttatttacttgcaactgttttaaatgaagcatctcatgatttaactaatatatcaaaaagaagaaatagtaaagctggtactttagatgaagaaggaatgaaattaggtgaagatgataatgaatatgatttaagatataataatgattatgaacctatatatgaagatgtttttgaagaggatgatgacgaagatgatgatttaatgggtaataatataatacaatctcaaacgaaaaatggaatagaggaatttgattatgatgaggggaatgattttgaaatgtctgatgatgaagaaatggcaaatataaatcaagatgatgaaggatttgtatgattattgatatgattaataattatcattatgatatttgctaacaatttgcaaacttaaataacaaattcaacaaataaaaccaacaactaatatgtctacactttatactttcgttttaatacttatttaataaactttaacaacaataatcaaatgaaatgatttcaggaattgaatttcttgtaaatgaaataggaattcttagtatccttcataacaaccataattacagataacacggaggctcagctattcaatctgttatcaataagctgaaattattttatagtatcattgaataacctcttttgcactctaaaaatacataatcatgttttttatgccaacaccaacaccatctacttaatactaaccaatcaatactccaatacatcatttaatcatctcagagaaaagagaagctgctattataaggcaaagctactattatactactacgcgagacttcactttgtaagaaatttaaaaatttcaacttttcgtgtcagttatatagtcgtaacttttcatcaaaattgagcattgaaagcatcaacaatattagtatattaggacaagttaatggacctgacacactatttccctaatagtactttgatagacgacaccaaatatgataatatactgaactctttaagaaaaagtaaaattacaacaagtgaattactactttcttcaactgaatccatttctaaaaaatcaggtaaaagagaagatgaactaaatgaaattataattaaactagaggaagagacaaaattgaaaattaaagaatctttatattctccattaataagtaataaatccgaacaagaaaatttaacatactttacagttggtgatgaattcattgataaggctttgaatggtggtataccaatcggttatttaattgaaatctcaggtaaatctgcaagtggtaaaacgaattttttactgacgttatgtataacaattcaattaccaattgaatttggtggtttaggtgcatcaattttttcatcaggtaataacaatagtgatacaaatgttaaaacactgtatataccaactgaatcatcattagcaactcaaagattagaacaaattattgagcacttttcaaatcttttggaaacgaatggtatatcaagaaataatttacaatttttccctaaattagataatgttattacaacatcaaatataatgtctaatttagaggaacaagatcatattttaaaatatcaattacccgttatattatcaagagattcaagtattaaactggttatattagattctttaacacatcatttacgtgttcaattaccaggatataaacatgctgaatatatcaaaaccacttgtacatatttaaagaaattagcaaaaaaatttaatataacaataataattgctaatcaagttactgataaaccagttaatggtatatactctgaaaaaaataatctttccttgaagttgaatactgaatatcaacttggttggatgtcaggttgggatgatgttggaattatttatagacattcaatgagaagacaaggattgattgatgaagcaaataaaagttttgaaagacttgattatctagatgaaattcaatcaggagattatagtaattatacaaataataatgaatatttaactgccgtcgaggatggtaataatactagttttaaagatatcaaaaatattttgaaaaatgataggaagagattatttgatagtagttataaggtaaaagttagtggaataggcacacgaccatcacttggattaccattactaaattttattgatatgagaattgttttaagtaaagaatacgctccaatattgaatgagaatttgataggtgaatttagtgaagaattaggattaaatacagaggatgatattgatgaaataaatatgacaaatacatcaactaattctgatgttattgaaacgtcaacacaaatttcaaataatgaaaataagaaagttgaaaataagaaaattttaacttcattgtataacaataattatttgaaaaactataatttccaatcatttagaagaatgaaatgtgttttcggaccattaataccagctggtgagactggagttgttgattttgaaatttggaaaggtggtttaagaaaatacaatagttgattattgtagaatgttataatccaataagagttgctgtttgatacattacatgaatgaatctgatacttttatattgttgattcggagtatttaacaaaggtacagtaaaacttaaacggccagcggcgcagcttttataactttgttgtggcgggtgaaaaaaatatttcagcatgaaaatttgacaaactgtacttacttacctacttgtagagtggaatgaatatatcaatgtttagtttcccatgcttaaaactgtatagaacaaactactcaacaatgctacgaataaaatataataaaccaaatatacccaaactaataccgaaattacagaaatgtttttatagtcaaacatctagaataacgttcactaatttagaagatcatcagggagatatacccaatcagaaaacgtatatgccaatcaatttaaaagatttatcaattccaagcaaaaagaaagagaaaaatataaatcaacccaacaatttgcctaccatgggtcagattgatttgaattccttcaatattaataaagatcaagcaacttcattttttgacgtttctttactccccacttggtatgaaagattaaatcaaccttcaacatatcgaatacataaagatttagaaagtgatagttttccattccgaagtttccgaaaatgttattctagaatattgacattatattttgatacctatattacattacctccatcacaaatgtacgaattacagaaaaaattatactatgatagagaagataaatcacatatacctgattctgtacaaaaactagaaataaaaatagatagagtaaccagaaagttaagcgagttatcattaaacacatatatcatattcaaacgattgggtatacgaagatcaatacccccattttatttacatcaacaattttcagtaaatttgaatgagagaaatttatccaatttattgaacttatattttgaattacctaaaccaagaccattatatttgagacgtgatgaacttgaacagtttttaagtttaatattatcaactaaagtatcaaatgacgataataaagctcttttaccaaaaataattgatgtttttgaggatatgtaccaaaatgttaagtcaaaatcaatggaagattttcaattgacgccttttgaaaatactaaatatttatcacttttattaaactattggaaaggcaaaaatatgtcacaagaggaaaaatttaataacatcatcaatcttagaatgaactcattgaaattttgtcctgcaatgtgggatattctattatcacatttacctgaattttgtaatgaaataatgaaaatcatgtcagagaaaagtggtttaactagattatcagctggtgttttcataagatatttgactacatacgatgaattaaataatacattagaattaatgaaacttaaaaattaccatttagattcagaactgttggatatcataattaccaaatacattgaatttgggaaaattaaggaagcaaaagaactaatgattgaatttttcaaattttcatttgatttatcatcaactaactgggaattcccaacattaagaaaatctagaactgaattatttaaaattgatgtgttgaacaaaactttacaacaactaaaaaatgaaaattttgatgatccaattacattctcttggctaagatataaatttaagccaaatcctatcactatggggaaccttttgacaaatttagatagtttaactgatgaaaaagatttacttaatataatggtcgaacagaagatacctatctcaaataaacatgcattaaagttactgacatttcaaacagaaaatcttgcggatagaataaagttttttgagaatgtcccattggttttgaaactagtcaatgaatcttatgaatttaatgataatttacacattgcatccacagactcaaaatacgatacggaaacctataaaaaatatgttcatatacctactggtacatcatttgaattgaaggaaattgttaaaactagtatagaaatttatgaagaaatcagtacaaattccacattctataatattagagccaatcttgcaaatcaattggttcgtttaaatgataaattaaaatacctgtaaaaaatattaaattcttgtaactgttcttatactatataaaagaaattttcttatagataatagtataactttttataaacgatttatagataatttttatgctacaactttattgaacaattttaccttttttgtaattacgcaagaaagttaaatcttcattaatttcatctgcctttaatggtggacaatgttgaacacccttattttgatgttttatactcatcttttccttccttatactacctttactaccatataaaaattcattcaatacgggattttcagtcataattttagttgaatcttcattagcagatgaaacattaccgttattattactattataatgactactaccattagttaaagttctctttctggaattagttgcagttgcattacttgaatcatacgagtcatcattcgagttagttgcattaggatcatttgataaaccatcattatttctctttcttcttgatctacgttcaccagagaagaaaaagctggaattagtatcaaacccagatgtgttaccatcggtattataaccattattattagaattagttataatactatcgttaaaattagatcttgatcttgatgatgtatgaagattgacagactttgaagatgtaacgatatcaattaatgctttatcttcctttaattgttttattttattaagtaaactttcttgcattttatttttaaccagttcaacaactgatttagtattttcaacaatttcatcatactcttgttgaaacgatttattaataaaattaacttgatattcttctgctaatcttaaccttacaagttcggaatctctccactcttctagatctctagttttttctaaagtctctgcattttcacctgaatgtaatgaacttaatttatattgtaaatgaattaacgaatctctataatgaacatctttatctgctataaatctttgatctaatttagccaacttactttgtatttgtattctcctacgtgtacgcttagtaagatgttgttgagcattagattgatcatattgatcttctggatccatcatattctgttgatataaagatgctgaatattgttgtgatggttgatgtgattgtgattcatatgtcgactgtagttgttgttgctgtaattgctgttgctgttgttgctgttgagctaactggtattctgatgttattggaacagatcctgatatttgatcaagtataattggttgctttgattgtttattgacttttggtttcacttgtttagcttgtttcacctgttttggttgttttggttgcttggtctgtttagctggctttggtttaggttttgtttgctgaacagttagagattgtaaaggtggtaaaacagtaggttgatgttgatgctgttgttggaggagttgctgttgttgttgttgttgtaagtactcttgttgttgagtattatttaaatgaggtgattgaccatcatataaaacatgtcgtggtaattcaataggttgttgagattgtccaaactgatatggagagtattgagataccatttgatgggttggatattgattataagagagttgttgaatttgaaattgttgcatgtgtttaagttgttgcatttgttgaatatgttgatattgttgcatttgttgcatttgttgcatctgcatttgttgttgcatgtgttgttgttgttgctgttgttgctgttgttgctgttgttgctgttgttgttggatttggatctgattggcttgttctgtatccggtaccgatgcagacataccatgcccatttggaacagttgaattcattactttttaattttcaaacaaacgatacaactcaaatgccttgctagaaaggaaaagataacttcaaaaagattattaaactgaaatcaacagaagttaaaaagaaacaagataagtgaaaggccaatacacagcaactatcaagggcttccttccactttctgcccgaacattgcaaaaacaaaaattattttcactgtccgttttaggaaacccaatgatatatcacttaaattttttttcagttttttggatttaatttgtgttctgttcatatagatatataagcacttagatatttgaggtgaaactatacttatggtagaaacaaagtttgttattttagaggattcgaaaaacatcaaaaatgtcaagtcagctttggaaaagcttaactggttagataaatcaaccaagatcatgcaagatcctagtaccaaaagtttccacttacctatatcgacaggaagtgatatagatttgactcaacttgagcaaaaattaagtgattcaatacccaatgtgaagtttaaggtcattttacgctcaattgatgacgaagatcactcaaaatcaaatggaaatactttacaaagcatattatcaaagataacagaaaataaagaattggttttgaaactcgtcaattcattccctaaaaaatattccatatacactccattacttctattaccaccaaaatctttagaatcggaagaatggacctctattcttaatgatttggacaatgaacgaaaacaaactctattcaaatcaattcttgatatttattcaacaccatctagtccattaacacatttagctatcaataaaccaattccagagtctgacaacattatcagatctcctgtacatttaaccatgttatatggagatttcaacaatttttggtgtcatacaattcagaatggtatatatcaaacatggatgcctatacatacaatgttttcaagaggtaatattaaagaaaaagctagaatcttatctttaaataatgaatcatattctaatataaattataataccgatgttattgatatgtatgcaggtattggatattttacactttcatatctgaaaagaggtgcaagaagggtatattgttgggaaattaatgaatattcagttgagggtttgatacgtggagtgaagaagaataagtttggtgaatgttatcttgttaaaagaaatgagaatatcgattattcaaaattattaaaggcaagatgtgttatatttcttgaaagtaatgaatattgtattgatagagttgatgagatgataaacttgggtacgagttttaatatttcacatatcaatctaggattacttccgacatcggtagattcttggccatacacttgcaaattactagataactatggtgataagtcaagtagttggatacatgtacatgaaaatattggaacggatgagatagaggatttcatggataaaactaatgataagttacaatctatgttatataataagaaaataacgcctatatggttagaaaaggttaaaacatttgcacctgatgtctatcatattgtaggtgattttaaacttatagaaaagaattaatttttatcattcatagctatataacaatatagatcatacatttatataaatctttctttaaatgtttttgctactacttgaatcagcaatagttttagttgacggcttatcagagataacatcagatttctttgaactctcagctcgtttgatgatttcaaggtaattagttggaatatatcctatacgaccatctcttgatctacaatgactccaaccatcgattttgtttaaaattgcaactaaatcaccacgagttacttttagttccttccacccattaggttgttcatcttcacgttcaggaatataatcatatgttgctcttgcaaattctaacgaacgtggatcaatagtagaactaattgtatttgatgtagttatattagcattagattgtgaatttacttgttgttgaatttgttgttgttcgatatatcgcacaaatttggacattaaaacaggcaatcctatcaatgcaactaagaaaactattaaaggttttaaacttaatctatttgatttacttttttgactgtttgtattagttttggaggtaatatttgaaccagattgaataccatttctccaattactgaaatcttgaagtaagctagttgatccattaggatttgaatcattaattccgtttgataatcctaataattttcttaatattcttttcaaccaagctaaaacagcgtataatccgagtggtccattattaccattcccattattaccagttgcactatctttaatttgtttaaaattattaccaacaccaacaatactatcctttatagctgtactcattccaccaaaatgacttaattgatcagcaactcctaaaattgtgaaaaaactattatgagtcgcataatatgtactttcaagtaatgcagcaattgaacttactgcataaacaacattttccaaaacttggaaagttctagttgttgcatcagctacaccatttaatggggaattaacaccattcataccatttaaaccacccattccatttataccacccattccataacctccataactattcattccataactaccataactacccatacctcccatacttcccataccgtatctattcataccacctaatccacctagtccataactactaccatatgaatttccataactaccataactaccatatgtactattattattataactattcatatttgatgaagtataagaatttagcggggtggaagatgattggtttgatacggaggcagggatcggaggtatagttggagtttccgtactattatttgttgtagagttacctactgttgtagataaaggaatactagtcgtagatgtattagtattagtctcccaaggcttcggtcttgcttgtgccattgttaagttgattgtacagttcaaaaagaaacagtggagaaagaaagggtagaaaaatgaacatcagaattttcacctaagggacttcttcttatcgcgataaaaggagtgggaaaagcttaaattgtttatcagatcaatttagtacttaaattgtgggtatcctctgtgtggaattagttgtgttttgtgtctattttggctgttttgaatgttattatggtcatattaattttaattgtactgtaatacattcaaataatatgtttgaactgaattgggacttaatttgtataaatagtaagtagttaacaacagtaatcaagctacagtcgcgacgccaataaggttaaatgttgatatttccacatcataattataattacttttaatgattaataaataaaacggataataataatattatattaggaatgttaactgagtcaaattagcaaaataagaaaagaggaaggaatatacatcataaatttataaatatacctaaaaatgaaaatgtaaattaaagatttaaattaaaatgaaactaaaacgaagaaagtttcattaataccatttaacaacaactttaccagctgccttaccagacgcaactctttgataagcttcctcagcttcagtgtatgcatctttaattgaatcaattgaaaagataaatttgttttgcttatataaagtttcaactgctttaccataagtatcacattgatgaaggagaattggttcaatataatattttgataaacctaatttaaatttaattttattggataatactctgtaacttggtaacatgttgtataaggtaatattagtataatcaataacgtaagaaccaccaacttgagttaaaataccattgttatcataagtttgtaataattcattaaaataatccataacaatttcatctctaacggtatcaacaataatatcaaatttaccattgactttaacaaattctaataattcattaatctttggtctatcaccctttgtataatcaattaaaatatcagcaccacatttagtaattttttcagcagattttgaagaacaagtagcaacaacattaccagctttaaagaaatgttttgcaaattgaactgcataagtaccaactgaagtacctgcacctaaaattaaaacatttttaccttctaaattacccttataacaatttaaacattgatatgaggtacctgaagcaattggtaatgaaccagcttcttcatatttcataccttctgggattttttcacagataacagcagttgcaggttcaaaaataatatattcagagaatgaacctcttaattttatagttaaaatatcaccataaattctatcaccttctttaaaattagtttctgaacctgccttaacaacgagaccagcaaaatcaccacctataactctatcacccttagtgaaccaaccattgttcatacctttgaaaacacaatcaacaggattaattgaagttgccttaacttgaactaataattcagttggtttaataatttcacctggaacaacaggaatatcaatttctttgatagttaatggagttttcttgtttaaataagtaactgctttaacttttaatttattatcgacaattgggagtgattgagtagacattttttttggctgtttgatttgtgaataaagttaaaacagcaaagaattgaataaaatgaaaaaaaaaactagagaaaaaaaaaacattttgaaagaattaaataatactttataaccattatctcaaaagtaaaggaaagtgtattaataatactaataattaataatgtcacttcccttgttaaaaaaaattaactttttcaatctccgcggactaccgatggtatgccgaaacttctagaaatcttatttctttacaacagtctctgcagtttgttaatattgtctagtagcagtaactgccaagagaggcttacagttagataaaactattacaattatgtaatattaaatatctattctaatgactaaatatgaataaaaaggatgttacatggagatttatcaaagattaatgcggaattaaacggaatttagtcttatagagtatttaacggagtttaatatggtagagtggcgcattaaaacattaatggttagtaatcttcactacaatcatcaaatttaatgttttcagtgatggtttaaaacagtccatatgatttaaacactttaaacactatcatcttcgttgtaatttgatttggaatctgctttaacaaaaatacctgcagaatctccatcaataattatatcaacaaatgtaaaccaacctttattcatacttctcctacaacaatcaattggattaagtgaagtagttttatcttgaaccaataattcattaggcttaacaatactagtacaattgggatataccaattaaagaaaaaaaatctaatctttaatctaatctaatttaatctaatattatcaaagaacaattccgggaaatgaaataactctatttattaataagaagaagcttgaaaaaccggactttttggctagatttcgttatatccgtatttaaagacaggagcccttattttgacatctctcttacgaatatcatgcttttctctaagttttgtagttctttttcagtttttgttattatgctttgtttttcattagcaactcctatattttcacaattgagatagtgataaacattatctcttaagttttgactgcttttttgagttactagatgcaaattactatagtagggtcataatgcatttattcccacgattgctatgctttccgacgggatgttaaattataaaggtttatctttgaaattaaaatctataaagtactaacaattaattaccatttaaaaacaactttaccaccaactttaccaccttcaattaaatcataaccttcttggaaatcactataaatatctcttactgaattaattgaaaaatttaatcctctctctttataaagttttgcaattacttcaccaaacgtatcagaactatgaacaatttcagtttcagctttataatttgataagcctaatgcatatttagtatattgtttaactcttctgaatgatggaagtacatcaattaaaccaatatttttaaaatcatcagtatatggaccattaactgtaacgaaaactccattttctttaaaagtcttcaataatgaatcaaaataatcaattataatttcatcccttacaacatctattataatatcaaatttaccattaattttaacaaattctaatagttcattgattttagaagtatcatctttagtataatcaacaaatccatcagcacctaatttaagaactttatcacttgatcttggtgaacaagtgccaataactgttccaacattaaagtaatgtttagctaattgaactgcatatgaaccaactgaactgcctgcacctaaaattaaaacttttttatccttcaagtcacccttataaaattggaaacattgatatgcggtacatgaaaccattggcattgaactcgcctcttcaaatgacataccattcggtattttctcacaaactaatgaagttgatggatcaaaaagaatgtattcagaaaaagtacctctctgaaatacttccataaatgacccataaatttcttcaccttctttgaaaactgtatttgaacccgctttaattacaacacctgcaaaatcacaacctaaaactctatcacctaaccaacctctattgaaattcttcattaaacaatcaagaggattgagtgatgtagcctttacttgaactaacaattcattttgcttaacaatactaccaggtgtaatgggtatactgatctctttgatagcgagtggagcgtatttgcttttataagtgacagctttgacctttaattcattattaacgataggaagtgtaacacttgacattgtttttgtttaattgtataatgaatacaatactatcttaaagagaagcattatttgaaggatatatcaccagacttttatagtgaaaaattcgataaaatgaatcatatagagaaagcacggtaattcggagacggcaataaaaattactaagaaatgacactatctccagattttttcgttcgttgctagggtcctcattttgataaaccttgtttatttccgtttagtttattagttgttattttctttttcagtggaaaataaatacatttttttattaacaatacacattttaattaattaatttaattatatagttttctttttaagcactccacatgctgtaaagttgtggttcgataatactaattggttgtacgtcatctttaacgttattactattattattatcaccagtagatttattctctgtagtttcttcgattttaccattactattctttgcatcaccattgatatatgttgttgagttagaatcagaacttggatcatatttagcttcaactattgctttattaatgatttccataacttgtgtaattttattagtaattgattcagtatcattattattaccattttcatttagtgattcaagtatttctgaaacttgtagtactttttctctaatatttaaacattgctttttaactttcattttttctactattaaattttctctttcactaacaacatatctttgttgttcacttatacgtgattctaaattcataaatccttgtaatttaagttcaaatttacgtaatgaaagttttaaaattgatgttataattttatcttgattttcaagttctaatttagcttgtgatttaatattttcaacaattggaatgttgtttgctgtagttgtagttttagttgtagtttcctttatagttgttatttctgtagttttagtctcagtttcagttgatgtacttgaagctgcagatatttgattatttaataaatctaataaacttgataaatcaattgttttattttcttttaattttttcaaatattcaacataagaagatttagagatatgtttaaataaataagtatcttcaattggtaattgaataaatttcattatacattgatcttttgctcttgaaccaacatgacctgcaattaaattccaatcttcaccatacatttcaataccttctaataataataaaatttcattattattccaaggtttattaccattattaaatactgatttttcaagtttaacataatctgaacttttaaaataatcttcaaattgactactttcataacaagcagttgaaatatttgattttgtctttaaattatgataccttgtctctgttatatcattaccagtaattgaacaataaattctctttaattgttttgaattagaattatttgaattactatcttgtaatataaatgcatcatcagcagaatcataaacattttttcttaattgaagatttaatttaacatttggagttatattatttgaaaatttttgtcttttatttgatacttcatttgaagtattattagagatattattagatgaattattagaagatgaattttcattaatatcaggagttttcaatgcaaaaccacttggtttatctaaagttatttggaaatgaccagtatattgaggacccattgaaaaacttttagtttttggatcaatttgataattaattaacccccattttgataaaaatccataaattctcattaaacttgcaacatccattgcaatatttcttcttaaagcagtaattgatatatattcaataggatttaatctataagtattaatgataaaatctctaacatttttataaattgttggatttttatatttataatttgatgataaatcgaaaaaatctggtaaagaatttttttcaatttgatgaattgaatctaaatcaaaccatttagcaaatgatggaattataacaggttttgtttgctttgctaaataaatatttgcttgggtatataaatcatttttattagaatttatattattattattgttgttgttgttgttgttgttgttattattattattgttgttattaatgttattattattagtatcattagataaggatacagatgagttctgaggtgcaggagttgcagaattagagacagaagtatctaaggacattgcgttaatcagatttggataattaaaacgccaaaattgaaaatcgaaaatgaattaaatatcaaaattaaaatcaaaattaaaatactgaaatactatactactaatcgactctctcaatgaaaacattatgaattgcaacttgacgcctgtatcatttttttttctcaacactttttttccgttttctttcctaatgcggtaatggagggcgcgggtggcaagagtcgcgacgatcgcgtctttttggaggggcatttttttatttttttgattttaactgtgtaacatgaatttacagacgtggagtagagtagagttcacgtagagacacgtagagatatagagacattcacgtgtcatggagacattttcagaggagaaaacattagctgagcttttggctaaagagtatggaccttcaaatgaagtcttaggaactgaaaaaggtgttaagagtgagaaaatagataaactagatcacaataaattgaaaaaattacaaattttaatagatcaatcaaaggcgttctctcaaattatttcatcttctttagtacaacagaaaactgaagaggaaaagacagatgatgacgaacataaagctaaaagacaaaaaattgaaacttctcctaaactagatacttataaacaacctaaatcattagttaatgttacacttaaaccacatcaaacaattggtatgaattggttaatttcattatatgaaaatggtcttaatggtatattagctgatgaaatgggattaggtaaaactgttcaaactatttcattattatgctttcttttagaacaaggtattcaaggtcctttcattatagttgcacctttaagtgttgtttcaaattggactttagaattagagacttttgccccttctttaactttcttatcatatgttggcgataaaaatcatcgtgcaaaattaagaagaaaatctcttagaaaatttaatgttatagttacatcatatgaaatttcattaattgatttcccatatttgaaaaatattaattggtcttatttagttgttgatgaaggtcatcgtttgaaaaatgctaattgtatgctattcacaaaactaaaatccttacatgtatcaaatagaattttattaactggcacacctttacaaaacaatttagctgaattatggtctttgttaaattttatattacctgatgttttccatgattttgcaactttccaaagttattttaacttctcagaatttgaatctttagttaatgatgaaaatgatacacaaacagaaacaaacagtcaagaatttaaatctcttatatcaatggaaataagaagagctttagttgataacctacatactattttaaaaccttttattttaagaagactgaaaaatgatgttttaacattacctcccaaacgtgagtacattatttattcaaatctatcaccattacaatctttcctatattctcaaatgctacaacctacagtcaatttccgttctcaattactgaaagttacatttccattttatgtgaaatataatttcccagatttagaaaaatataccgagcaatatttagccctaaagaaagaagaaataaatgatgaaaataatgatgaaaataatgatgaaaagacaaaagaagtaacaaaattaaaactacgaaaaagtataatatgggaactagatgaacactataatttcgtaaaatcacaactgaaaatgaaaagattatcaaatccattaatgcaattaaaacaattgtgtgattctccatatcattattttttcccttggaatgatgatactaaaataactgatgaaatgattttaaatacttcaaaattacaatcgcttgattcaataataccaaaactttttgaaaaataccctaatcagaaaatacttatattctcacaatttaaagcaaccttagaacttttagatacctattttacggaacaccctaaatttaataacaaaaatagtgtttttccattgaaaacctgtatattaacaggatcttcatccaaagaggaaagagatgaagcaatcaacactttcactacggatcctgatcataaaattttcttattatcaacaagagctgcaaatttaggtttaaatttaacttctgctacaactgtcattttatatgattctgatttaaatccaatggttgatttacaagcaattgcacgtgttcatagaataggtcaaacaaacccttgtttagtttatagattagcaacaaaggcaacagttgaggaagcaatttgggaacgtgttgtcaaaaagagagttttagaaggaattgtcattgaattaggtgattttgatggttcaaattcttcaaaaaatgttaaatcaaataagaataaaaaagagtcagtacttgactcattattaaatttttatagttcgaaaacttcatatggttcatcattgagtaagtataatgatccatcattgagtttatcactatttgattcaaatcagctaacagagagtgaattagaagagataacttcacatgatttagaaaaatactcagaaaatcatcatatagatgagtctgaaatgtctcatttaagacttctctctgaaagcgatttaacatcacaaactggtttattgggagatgcattgatgtaaaaattacagaaattattcattatatcattattcattaaattacattattttatagatcacaatcattacatctatatttatacattacattcattttacagctttagtaaaaatctcattaatttgggaaacgtcatatcttacatttctttcacacaaacatcctttgataatttcgttcaaagttcttaatttaacattattttcagactcaaattccatacattttttccattcctctgtttcccaattaccttccattattttcaatttcagtcttggttcgtaaatatgccaaaatggcagtttaagtacaatcaatgtgtaaactaacacaccaaaagcccaaatatcagcacttttgtctaaaggaataggacatggttttaataattcaggtgccgcatatggtaatgaaccaatattcatctcatttaaattcgcagcattagaatcattacgattggtatgagttcgtccaataatatcagcactcaaatttaatccataattactcttaacacttgcagatctggcaaacgacgaggaaaccgaattggttgtatcaatatcacttgcttcacttgaaatttgattcatctccaacaaagctttgttcagttcgttagttatagattccgttaatttggtaggtaaatactgcttgaatttttttgatatatcaagtgtagaatcatctaatacattaaaatcaaaattggttgttccaaaatcacataattttggattattattatctactaaacaattctcaagttttacatcaccatgatgtaacccacgcccatgtagatatttcaaacctttagcaattgtctcactgtattgaaatatatcatctatcctatcattcaaacacacattttgtgtttcccaagatttaactttatcaaatagagaaccttcattatacagtggcataatcataaaaacaaattctggtgttattttcacatcaagtagtggaacaattgtaggatcggaaagaactgaccaaattttaatttctggtttactgttgaatagttttgtctgatccttcttaattggaataactttgactgccttcacattttcgtaatcattaacatcaaaacattctcttataataccgaaacttccattattaaaaactctccctaatctccatttattcagtattatcgagcctaatttattttcattttcctttggtcttaaatcacgtcgtctatcaggcgcaaacatttctaatgaagtagatgagtttggattagaaaacgaagctgaattttttctcaaaatcttagaaatatgttctttgtagttagtgtctcctctcaaatcatcaggtaacaaggtgctcaacacttttttcctattactaaatgataaagagtaaaaatgttttgggatacttgacaacactgatctgtcagtatctctttcaggagatcctgcaattttgaaacattcatcagaaactgggaaaaattcagaaatagtaaagtcagctttgatttctgcgatgtcaatagtttttttttgtacattttcaatatttattggctccatagcacattcaggggttactccaaatattgaactttcgtcttgttgtaataatttttctttcttaaattcatgattcctttcaaaagcatcactgatacgacttttacgtttttttgattcaattttgacaatttcttttttctcaaacttatcatcataatcatcatcaacaataacatgttcatcaattccaaacttcttaagattaaattgacttaatgttggtatatattcgtcaaaaacttcttccttagaatatttttgatgaaatatagcacgtttagcatgcgaatgataataatctggttcccaaaatgtgcttgagtctgtagtatcttcatctttttttcttaaattgcatgtcaattccataccttcatcattgtacaatgttacggattttcttcttcctgaattgaaatcatatttggacaattcattttctgaataagtcttacgcaactttaaattatcagaactattataattcttattgaatttcttaactgcttctctaaaatcaaggtcaggtatttgttcctcattatcgattgtgtttaaacctcttaaatcaggagctggaactccaattaaagtaggcaaagtatattgtggtggtaattgatctctataaataatatttgttgacgttaaatatgaatagtctctgtatttattccttcgttttctgtctgatcctgagattacactcgatccagctgaggaaggcgcatttgacatctaatgatgcaattttaccaagtaaaaacaatccagtatatctctgaaaaattgatagaatataaaatatacttaaaagtctgtatatcgacttcaagtaagaaatgaactggttaagttgtcctttaattgtcaaccacaaacgaaagaaaaccttaaattgaagtaacagtagtctggctttaaatctgacggcaacgcactttacaaaaataaaaaaaataatttcgaacaagtcattaccatttctaataggtttcattttgccttgctttgggagggtttactttggattagtattacataccaactaaattcaaaacactacagctttagcaatgtgtaagtcaattcatctattatctcatatttgcaatcttttatctcagaaacaatgtttactaacaccaatattttatagcttttaattttggaggcaattccaacaacaacaataataacaccagctcaggtttttcctttggtggtgcaaacaacaacaatacatccacgggatttggtacaggtgcatctaaacctttatttggagcaggaagttcaactactccagcctttggatcaaatacatcttcaaccccagcatttggaacaggttcaagtaccacaccggcatttggcgcaaatacttcatctacaccagcttttggatcaggatcttcaactactccagcatttggaactggcgcctctaccgcctctaaaccattatttggttcaaacacatcatctgctccaacattcggtggaaattcaactactacaccagcttttggtacaactacttcagcaacaactccatcttttggtgcaagctctactacaacaccagcatttggagcaggtgcatctaaaccattatttggaggtgctacatcaactaacactacagcaacaccatcatttggagcttctgcaactacttcagctacttcaaaaccattgtttggtgcaggttcaaccactacatcatcatttggcgcatctgcatccagcacagctaaaccattatttggagctgcatctactgcttcttcaactacaccagcatttggtacaggatcatcaactcaaccagcagcaaaaacatcaatgtttggtagtaattcttcaactacaccagtttttggccaaggcaacagtacccctgctacaactacaactacaactacatctacatccactcctgctacttcaactgcacctaaaactgcacctaaaacttttggttttggagcaccagcaactccaggtgccagttcaactctcccaacagcaacttccaaaccattatttggtggcgcatcatcttctccagcaccaacagcttccaaacctttatttggtggttcttcaactactgcagccccatcaactacttcaacgggattctcatttggtgcaaaaccagaagataaaaaagaagaaactaaaccaacaacaggactttcatttggtgcaggttcaagtgcagcaccatctaaaccaactggtatatcttttggtggagcatccacagctacaccagcagcaaaaccaagtggtttttcattaggtggtttaggttctaaaccggaagaaaagaaagatgaaacaaaatcagcaactggattctcatttggtgcaggttcaactaccacaccagctaaaccgacagggctttcatttggtacagggtcaactgcaactaaaccaacaggactttcatttggtgctaaacctgaagaaaagaaagatgacgcaaaaccaacaaccgatttttcattaagtggtttaggcggaaagacagaagaaaagaaagaggaaactaaaccagcaggaggattctcattgggtgctaaaacagatgacaaaaaagaagaaaccaagccagcaggaggattttcatttggtgctaaagcagatgataaaaaagatgagactaaaccagcagataagaaagtttcatttgaagtttcaaccactacagcagaagataaaaaagtaccagttaagattgaagatttcaaaccacaacaactatcaattatgaacaaaaatatggaagatttaattaccaaatggaccaatcaattaactttatcatctaagacatttgaatcatatagtgataaaattggagaatgggataaaattttagttgaatcatcagataaagtttctaaattatacaatgatacactacaagctgaacaaaagcaagaaaagattgatcaaacattagcatatattgaaaaacaacaagatgaacttgataaagttctttcagggtatgagagacaatcagataaattattatcatcaatcgaaaaatcaacaccatctaattcatcaagtataaataataaggaaaccaatgatgaagcacgtgaaaaggcatataaattagctgaaatgttagaaaatagattagattcattaggaaccaatttttcatcacttgttaatgaagttaatgaagtaagtgataattttaatagatcattattaaatactgatgcaacagagactaatgaacaaacattgaatgatgttctaaaattgcttaataatcatatggaatcattgagttggattgcagagaatgaaaagcaattaaaggaaaaactcgaaaaattatcaggttccgtttctaaataacttcttttgttttaatattatatacgagtgtttaatttctagaaatttacagtagtttaatttaattaaatttaattccaaaatagaatatattgtttaagtttataaaatttttttttaaaaaggtgctatttcatttatttgtagattcttttaatctatcatgtacactctgttgtaaacgatattccaaacgtgatctattagagtcaattttaacttgagatgatggttgtggtgaagcaattggactcgttgttgatgatgaaggtgacataaatttccaagattttgtagatttcaaaatatcattgaaaaacaaattatttgatgaattattcttttcaattattttaataagtgaataaatatcaccttttgaatatttttcaatcaatgaaggtccaaattgatttaattcagaatccgataatccacaaataagtgcagcatcagaaaataaatcaattgatgatggtaatttatcaatttctaacattttttctaattttcttttaaatggactttgtttttctctacttttcctaaatactaaaggttcatctttattatcctcaaggttattatcaatattattatcatcatcaaattcaggtgatacagatctacttaaagttgtatttgaatctattggataatgtaataataaagataacgcctcagattcatcaaataaatccatttcaccattagaattaccattaattccaacatcatgacaaatttttgaaatatttttatttaaacattgaagtagttttgatctaattcttaaaattaatagaattataacatatggcaataaaactgatatatcatgaccatttgatacagtatctgacattgccccaacacatgcataagcaattaaaccatcccaaatacgaactgaataagctaatccaagttctctagttaataacattcgaaaccatctagttaaccaaagttgtgattcaatattagcatttttcaaagaagttgctaaaccaggatattttggcgattgttcatgatctatatgatgtaattttaaatcaaagaaaatactttcacgtacaatacctgatgatgtaaaatatttatctattattggtgacattaattgtgtaaacattgcaaatacatcatgttggaaatattttgatgctaaaaattcctttatttgcatattaagattatttattgtattagttttattatctttatttgtatcatcatcctttgtgtcatcatacaattctaccttaacaactgcataaattacagcacataattcatgcattccttgtacataacctatttgttttaaaccttgttctaaacgttgttcattaatccatttagaatatctatataaaatttcaatcattttaattttatcatttttactttcaataaacatatcagggtattctggaaataatctttcaacatcaccaattatcattgataaaatattaatatcagattcagattttgaatttgaatttgaatttgaatttaatttagttttagataatggatcatcattatttgatattgattgtttaggtaatcgacgttttgtatttaaatttgatatattaagattagttaaatcttcttcgacatcatctattggattttgatttagatttgatgaattagaggaatcagatgtaattgaagaataataaattgaatcagttggtaataaatgccaaggtataccaattttacaaattaaatcattataaatatttctatgatttcttaaattaattaaattaattgagggtaaattagttgttgaagataatgagatatcaatttgtaaaagtgaagttttccaaagtaatgatcttgagaatggatacttatgtgaatttgaataaacatgttgacctgataaaattgcagctgctaatgaaggtcttgaagggtattgttttaaaacttgttcaattctatgaatataatcatgtggggtaccattatgatcaagcattgagttaattaatgaggaaaaggaagaaagaaaaggttgaaacaataatcaaacataacttttaaataaaatcatgcagttttcattaaactgtgatcttttaaaaatagaacaggatatgagaaaaagttcaaatgaaagattcgaaacgcggacttgttagttaaatagggtggaataaaataagatataaaaacaataaataaaaagtgttattctatatgattaatgattaatgattactgattactttgttcatcatcagatattttaaaatcagtatcatcatcatcatgatcatgatcactataagttgataattcaatattaacatcattaattggatgtaaagtagattctaaatctggaacagtattggtattaattgtagtagtagtagtatcaggtttaaaataaacaattgagaaaacagcaattacaatgacaatttcaccaactaatgaccaacctgaaggaattgtaccattagttataaaatcgaaaattgaagcataaattaattgagtataagtcattgaaattgctcttgcagctttttcacgttgcataccagcagttaataaaaattgcattacaaaacctgttataccaatagcggttaataatgaccattgtttaattgtatgaggtattataaatgataaacctggtaatataataataccaacaaatgatgcaattaatgtaaatagagcataaattgaaaccatgaataaaggatgtgcattaaaaccaattttcctaattgcacacattgcaacacctgtaccaaaagttgaaaaaaatgcaaagcaagaaccaataattctaccatttgaagatgatacaatatctgtactatctgaatttgaatttgaatttaaatttgatgagaataaagttaataaaaagtgtggctttgcaattaaaacaacaccaaataaggcaaataacccaccaatagcttcaacggatgtgaatctttcattaagaaaaaaataagccattaaagaagtaatagttggagctaagaaagtaatacaaacagtatctgaaacattaagataaagtaaagaccaatattgaccaccaactccaacgaatccacctaaagctctaagaaacaataattttctaaaacctttaggacctagagggaaatctttatttttttcataaaagcaaaaatataggatacaaaacatgtaagtaattgacattctaacgaataaaatttgaagcggatgcatcggtacctctaaatccggatccgtgataagtaatttgcagaacattatcatgaaagaattgaaaagttgagataatagagttaatagtacaccagtactgggtatttgtaatttcattgttgatagttatagttatgaagagagtggtgtaataaataaataagagaaacaaaagaaagcagatttgatttgatcattgatcattaccgactcttgtaaagatttcaatttcaattaaaattaaaattaaaattaattgataagaaaataatttttttttcaactgtggagatttattgtattacgtaatgtaatatttcttatgacaagaatttatgttgtggaaaactggtttgttttgatttcatgttttatcttattattattattattattattattaaaggttgtttatattaggatctattttagttcattttatttcttttaattattttttttagtttaccattactgtactacacaattatgtactcaattgcacttacagctactcgttctttatcaacatctacatctctatggcttaatgttacacgtcctgtcattgccaccaattttaaatctcaatctttaattagatctttctcaatttcaaatgtttatttaaaggaagctattaaagagaaaaaaactgttacaaagaagaaatctcctgttaaaaaatcaacttcaagtaaaattacttcagctgctgaaaagcaagctgcaaagaaagctttagaagcgaaaaaattagctgcaaaggcaaaaactttaaagaaaaaagaagctgctaatttaaagaaacaaaaaaaattagctaaattacaagaacaaaaggcgaaattagctgaaattaaaagattaaaagatgaaaaggaaaaggaaagaccaaagaaacctgcaacaggttttattgcctatgttcgtgaaaattattctaaaaatcgtaatggtgatgaaaattcaagaaatgttatcagtagacttgcaattgcttggaaaaatgaatctgatgaagttagaaataaatatattaatttaaataaagatgaaatggaaacttataaattaaattatgcttcttggaaggctaaatataagagacctcttaatgcttatgttaaatttattaaacattcttatgaaaattccaaaaaacctgaatcaaaggaagaatcaattaaacaaatgatacaatttgcttcaaaatggaaatctttaacacctgaagaaaaacaatcatttgcttcaaaataattttatataatgtagtttagttacctaactgcttagttcttttattattattattattatatagtatattttttctttttagatgtcatttatgtaacaattcgttaataataattgttagtgaattatcatgtttatcactatccttacgtaatcatatttatccaatttattgttacacatccaagattcaaagtaatcacacaatcaatttattatcatcgatattatttttggtttgaatctctggtaccattaaatatttagcatatatattaacacaatggcaaaatactttacaagtttatctgcctttattattttattctttacaatttacgttaattcagcattaataccagattctacatctgataataatgattctgaagaatataagataactgatcttttataccttgatatttatcaatccaatgaagcttcagataaattaaactctgattcaattggtacaattataattggtttatttggtgaaattgtaccaataactgctagaaattttaaagaacttgcaccaatttatgaaaatactaaaactttatttcatagaattataccagattttgtaattcaagcaggtgatattgataataaaggtggtcatagtatttatggtgaaaatggttcaccacctccaattgatgctaaaaatccaaatgattttggtccacattttagtggtttaattgatgaaaattttattatatcacatgataggaaaggtagagtaagtgttgcgaatgcaggtccaaatactggtggtagtcaatttttcatttgtatgggtccaactaattttcttgatggtaaacatgtagttttcggtcaagttttaaaaggtatggaaattgctgaaaaaattgttaatgttgaaagagatagttctgataaaccaattaatgatgttttcattaattatgcttatggtactaattatttaggtgaggaacaattacaattaactgcattatccgcaagagaaaatgaatctcaattaggtatcgaaaatgatattgaaaataatagtgaaaattcaaataatattgatttaactaatgatgttgttaaggatacttcaaatgataaatctgaatcattgaaaattaatgttccaaaaccaaattctgataatacaccagacaatgaagttgttgatgattctgaattaactcaatatcaaaaaaatcatccttcaggattaggtggttcttcaaaacattttgttttattaccatttattttaatcgttggtctggttggtttcatgtcatataaaaatcgtcgtacaattactacaatggtaaggggtccaagatatcgtagaattcaatctgttaattgatatgatccaatcattattgatgttatattatatttctatataattataattttaaatatttatataccttttttttctataattgattcaacttattattactatgaacttcagatttttcccatattctaccacgaatatccttttgaataaaactatgaatcacatttttgaaccatgttaaatctctagtttctattgcatttaaaatttgaaatttgatctcagatggattcgataaaacttgataaatattatttacatctaatccagtttgacccacaataatatcaatcaatacccattcatatccatcatccaaacttaccattggttcattttcatattgaacccagtaatcaaaatcatttacaattgattgcaattcaactttatcatttgttttatcataaataatccaatatttaggtatatgatatttcccctttccattatcatcaacctcatttatccatgaacttttatgtaatttattatcactaatttgcgtaaatgatgaggcaccatttttacaagtaccttcatcccaatgaattattattggtttaagcatattattgttaaatttattttcattaattattcttaaatttaatctttgtacactttcaccaccagtataattccaacttaaaatcaatccaaagataaaacaacaaattaaatttgtaaaatatgataatataatcaatgcaactaataatttcttaataaacttattgatttctattcttgattgaatccattcaaatgtacttgagccaactgcacataaaactgaaatagtataaattaaaaatttccattcttttttaccatttattgataaaactaaaacatagaaaaaatttgaccaaaataatgtgctaaaagttccaacaccataattaatataatcaatattgtataattcattatgtttgacatttttaccaaaaattctttttacattgcagaatgataaaatcaggaataatcctgttaataagtaaacaatttcaaaacctggtgcaaatattttcatataatattcagtaaaatagatatgaaaatcattcaatccccaattagaataactaccatcaaatatatcaacaagtgcagatttgaaagttggaattataaatgatgtgttccaaaaataagaatctattcttgaacataagaaaatacttaaagctgcagatattataattgaaacacaggcttctctaaatgataaaataggtttaccaattcttaaaatacctgaagctgagataattgtcaatacagcagtaaataataaaatttcaactctaaaaacaataccaataaatgtaaatacaattaaagatcttgaaatatcaccagatatgaacattgatattgcaaaattgagtaatggtaaacaaacaaaatgaggaacaaatcttgaaatatagaacatcatatgaggtaatgggtaataaaataatgaaaaccatacacctataaatttagaattttgtgaacatgaatgatcaatagtttttcttaatgataagattgagaatgaagatataattgatatcaataatcttacaaacaataattgtaaaatcttggtatcttttaaaagaattgataattcatcattattgtataatttactgattgaggtaggtaataaatcatttattgaaataagtaataaacttaaaaaatttgaaatatttttacaagtttcaggaatataaattgcaggtaatgaaagaaatataattggtaaagaagttttctttggcatatcagggtatttcatatgatcaaatgaatcaattttatcaagtccgatattaattatatcgtgtaaggcgttaacattgaatgattcatcataattggaatatggtgccagtaagataagtgagatggggacaataaaaagtaggatatctaatatgatctgtatattcctaatcataactgtgtttaaccctatatctatatatcaatccttcctgctatatatatgatctatctaaattcaacggtttatttgaaaacagcgataaagctttccttttatacaatcgtttaaaatgtttttttaaaattttccgtgtcacgtggtgttagtattttaaaatttttctatttctatcactgaatttttcactgttcttcccctggcctattaccatataagggttagaatatagatactaggatattgtatagaaatggatgatattgaactaattccagatttagtaactgatgaaaatgaagaatttcaattttatgaagttaaaaaacaaatagctgatacttctggtgcaattattgaagaagataaagaaaaacgtgtaccagttacaattttaacaggttatttaggttcaggtaaatcaacattattagaacaaattgctaaacgtggtgataggaaactagcagttatattaaatgaatttggtgattcaattgatattgaaaaatctttaactgttaaagataaaaatgaaaatgaaattgaggaatggttagatttaggtaatggttgtttatgttgtactgttaaagataatggagttgcagcaattgaaagactagttgctaaaaagaaaggttttgatcatatcatattggaaactacaggtttagcagatcctggtccaattactacaatgttttggttagatgatggattattatcaaatgtttatattgatggtgttattacagttttagattctaaaaatattgaaaaatgtttggatgatatagaagataaggatgaggaacatatacatcatcatgaacataaagaagggaatctgggtaaagataatcatcataatgaacaattaactgttgcacatgttcaaattgcattagctgatgttatattattgaataaaattgatactgttaataatgaggaaataaagagaattgaaaatagagttaaatcaattaattctaatgtaccaatttatgaaacaaaattcggtgatatatcattagataaaatacttgatttacatgcatatgaggcaactgatgttaatgaattagtacgaactaaaaatacagaatctaatgtacatgatcatcgaatgggtactaaaacttttgattttaaaaaattatcatcattagatgaatttaataattttgaaaaattcttacaagatttattatgggatgatgtaattgaaaatagaaatgaaaatcaaataaataaatcaaataataataaggaaatggaaatacatagagttaaaggtttagttttcattaatgattcatataaagtaattcaaggtgtacgtaagacatatgatgttattgatggtgtacaagatattaatgaaatcgaattaaagtgttcaagattagttattatcggtaagtacattgattctgaattaatcaagaagtcattcaaaaatcatatgaagtttgaaatactgtgatacaaggacacgaccgagataacccgaagttttgttaattttcaaatttgaataaaacaatcaaaagttggtcaaatttccatagattagaagcatatgattatgtttgataactcgtatccaataatgtatagtacattgatatatgattctataccaactgtataaaccttcaatgaccgccgtggataagataagagattaataatgtattagactggaacgcgataccatttccggtgaaaagatgagaaaatatttttttcaactatttaaaaaggtaggtgtaagaccaaataagttgatcaatatctactgatgataaatgttgactatcaatggaaagtgttaagttaataggtcttgggttgattacaatatgtccaattttggtatatatctttaaatttaaaacaagaaaagtttatgagttcggacaagaaatagtacctttagatattgatgttgatgatatcaaaagtgggagatttattgatagaaaatatatgccatttagatacccgttaactcaaactatggcgttagttaaattagatatgaatcattggtcaattgttgatgaagaatattatcattttatgtctgaaaagaagagattgtttgataattatgaagaagagaaattagcaagtaatccattttataagagactttatggatcagaatatgatcatatttgcgaagaattatgtgaatttgtagttactcattttactactagatttccaaaacttttccaaagagttggtaatgttgtttacaataaattattaaatgaggaatacgatttaaataaaatggatccatttttagttgtaactaaattatcaatggaggatttttttattacagttaaggatgaagatacgaaacaacataaatgtgttggagtttcagttgcatttggaggaggaggatttccaattgtaccaattgttggacaaggtatggatgaaattcataaaaaagttccatattatgaaagtaaattgagaactagtatgagtaaatggtttgataaatttattgatccagttgagagatcatcatggcatattgtatgggataaagatttaaattgtaatgaattatatactaaacatagagaatatcatgatgattcagaaaaatataaggaatatgttgataatataccatttagtgatttttatgtacgtgttgagagacaatcattaattaaattacctaagagtaaggctattattttcagcaatcatccattattccttaatattgagaaagatttacttgatgtacctgttattccaacaattattcatagaactatgcatgaaacacctaaggatattattaaacataaacattttgatcttctaagacatcatcttgatccttatctattagaagcagaaaagagacagcaagaaatgggtgtaatggatccctataagccagtaagaacacaggaagggttcccatttcgtaaatgatttatgtatataattgtataattattgtacaacgttaatacttcctaaagaagcaattccgcatcgggtaagtcagtgaagagaaaaaaaattaatttccatgtacacaccctcggccaatgagaggagttgtaactctaagtaaaagtgggtcttagcgaattatagtgatatttggagagagacactaagttttcattatattgtgtgtataatagattcattaaagacattacatttaaattctttttttttgatttaacaacacatcaaataaaaatgactcatcctggtgcatacatgggctggtggggttctatgggatccccaaagcaaaagagagttactattcattccgtttctccatatgcgcaatcaccattacatggatccgttcaaagaggtattttcaattcatttagaagatttaaatcacaaattttatatattgcaattccagctgcaattgtttggtctgtttggactgaagcaagagattataatgaatacttatacactaaggcaggtagagaagaattagaaagagttaatgtttaaattattataataattcatataatataatttttttatcatcattactacaactataaatatatccactactactcttattatgcaataagttaattttaatttgaatttcattaaagtaaaagaaagttcaatttatattaatttatttatttaattatttatttctattttatatttatataacaatatatcatctattcaatgaaaaaaatcgatacatttttttatcttttcttaattttaatacattatgtatgtatgtatattttgtatgcaatttttttaagtctataagtatagtaaaaagttataaaaaaaagaagaaagcataagagagatgattttaatcagagtatatattcaaatttaccagcatttgatttaataattatttatgtaataagtataataagtataatataactgaattaatttattcagcctttttctccttatcagaatcacttaaatcttcattgaaggcaacataaacataaccaattaaaacgatatttgcaacaactgcagcaataccaccagagataagagaattttcaaatatactattacaagtgaaaaatgcaattaatggtgcaagtatcatcattgcagtgaaaaagattagctttttcaaaacttgtctgtagtaaagtatagtaatattataagcaggaatattatcatcaatatgttagtaattcagttttaaatgaaaaagtacagtatctaatagagtgagaatatgatacatacggaggaatatcagccattgtgtgtgtataagtggttgttatcccagagaagataacagacagatcctaatccatatatagataatacctcttcaaagacagtgaaaacatgaacctcttcgaaaattccgcaatatcaaaaaatcgcaaaatcaaaaaaaagacgccaaatttccgaaataaaaaatgaaaaaatgacgagcctcccccgctacgccactcgccacccgcccccctggcggagaaaagaaaagcactatctccaaatttgatgacttactattactaacatgatgacaagccctctgatttgatttgcttatttattatattgctattgttattgatttgatgacttacatgcatgattcagtatatttcaaggttgtttggtaatttatatttctatctttatctctatctctgcttttctttttatctgattctctgattcttttattattctctcttatatctcctcttctcaataaattcagtcaatgcctcttacacctaaagaattagaacaatacgaaaatgatggttgcattgccattaaaaattatttaagtaaggataaagttaaagaattaaatgatgaaattgattcattacttaattcagttaatattggtaatcatccgaaaattaaatttacaactggtaatgataaagaaggtcatattagtgataaatattttattgattcaagtgataaaattcattattttttcgaacctgaagcaattagtgataataatcataaattaaataaacctttaaataaatcaattaataaaattggtcatggtttacatttcttaaatgaaaaatttaattcaattactgttaatgatgatattgcttcaatttgtagacaattaggttttaaagatccaaaagcggttcaaagtatgtgtgttattaaacaaccttttataggtgctgaagttccacctcataatgatgctgaatttttatattcaaatcctaaatcttgtgttggattttggtttgcacttcaagattgtacattggaaaatggttgtcttgaatttattccaggttctcaaaattatccattacagaaaagatttgttaaagatttaaagaaaggttatggtactaaatttgctccattaacaaatcttgatggtcaatttgtaccaaattcatctgatgaaaatattaaaattaataaattaattgaaaatgattcattatatgaaaaaattataattccagctggtagtttggttttaattaatggtaaattaattcataaatctgctaaaaatacttctgatcattcaagaaatgcttatactttccatgttgttgatggtgcatctaattatgatgaatataattggttacaaatcccaccttctcatccttcaggtactgataattttactagattatacaaaaattatgaataatcaataccaaaaaacttaaatagcattacttttcttattattaactacttttactaaattttttactaaaatcttaacctccctttaatttcttctttttcatttctataactgtctatttatactaaaatatactaaaatatactaaaatatactaatcccatctattatcatttgatggattccaaaatccaacttttgaatctttcatattatttaaaatattatcccatctcttaaacgcttcctcatatttaaataaatttggtgatgatgtaattttcttcattgcccaatttaatgtctttaatgaaccaccattcttctttaaactttcattaattatttcatcaactaataaaattttaaatctttgaaaattaactaatttcatataataatatgtatgtgcccttaatgcaccacctgtataaattaatggtataataatatctaatattttaatcaaattaattttagaaataaaatcaatattattactcttacttttcaataatccaatcattgcattatgaattaaaacaattggtatacatgtatcatattgtaaatataatcttcttattaaatcatcaattgctaatggattcctttcaattaatgatctaattaataaacttttaactcttaatggtgcaaaacatttaaataatcttctcttttcactaaatgtatatttcttcttaatttgaactttttcggaatctaaatataaattattttcaatattactggattgacttccatttatattgccaaatattttaactttcctatccttgggtattttgttaaattttactaagttatgataaagttcattaaattctattaaatcttgatccattataactctttcattactttggaaatttctcatattatttaaattgttagaattgttaattctattatcattattcacattctctccttcaatatcattctttgaatcattttcatctacattcatcgaatcaaataataaatctgtaacatcattaaatttcccaagttgttcaatttcattattatctactaaatcagtttcaattctattacttatatcattctttaatcctgacataaatttatatctatcaatatatgaaattttatcatcatgttttaaattatttaaaacatctaaaatacctgacccaaatgtattaccatcatctaaaactaagttttcattcattattctttcattcaaaagtttcttactatcttcttcattccatttaaatcctgatattgattcaacaagttcccaaacaatttcattagatgataattcatcattttcttcttttaaaatttgttgatactctatataattcactttatcaacttctttctttctggtcgatcttcttaagaaaacttcaaaaaatataccaaattttgttatactagtattaaatttattaataccatcaatattatctgaatataaccaatttgaacgtaaattccaaattttaataattacttcctttggtaatttcattataacaattgcaattgattctaataatccatgatatgacatataaaattttgatttataattctttggatttaatttacttaattcagaatcacctgaacagaaaccatcaaatgaaaaatttaatattttacaatattttttgaagaatgaattattttctaaaatttcattatatgaaatttcgttatatggtgatgatgttgatgataacggtttggcttcttcttgaagataattgttaaggaatgtagttgtagatggtaacaaacttgcagcgtacttaattgatccataatctaataatttaatatcatcaataaatttgactaatgtttcaaatatctccttatctgagtgatcattgaaaaatgaggaattattatgtttaatattatattcaattattctattcccaaacgtaaataaaatctctctattagaacttgttggagaattaactgatatcatttcaagtatttctaaaagatctaaatatgtataatttttattgaaattatgttttgtttcattttgtaaacttggattattgaaaaataaactcatcaatacttctttcattacctgtgaatgttccttaggttgatttgttaatcttatataaccacccacgtgattctttatgattaaactgttagttttatagtatcttgttaaattttgagatataattttactctttctataagttgaaagatttgaatattcaatattgataacttcatttttaatctttttattagttttaaatacttgtatgaatttttcaatcaaaaatttataataaattgttgatttaataagattatttttaccatccatattatatttccataataatatatttatttgctgatctgggtttattgataagatataaattgcagttaaatttgatacttgaacatgcatatcaattaataatgtctgtaaaataaaatctttcctttcatccataaacgaccaaacatctttaggtgataaatttaaactattcaagtaaatctctttgatctcttcttcacctaatgataagacatgacttaaaaatatctgtaagaacttttcattctcagacttgctgaacaccaattcattagcagttaataatgatttgaaatttttaatttgctttgttatattgagtggtttgtcgtttttataaataattgcagcttttattaagtatatcaatttcaaattgttatcacatactgtattactcaaactgttattataaatgacttcctttaatttctcataatcttgtttcaatgctgatatagaaatatatttcttattatacatgtatgacattgtttgaaactcagtaaatgtatcttgatttgcgaaaaagtctaaatttttgataactaatggattaatactcttaaaagctttattcaaatgtatcataaacatcaatttcatgaatttggatttttgaaatataaattcagtttctaaaagattatttaaaaattggagtaaatcattaaacgataaatttcttttaacaagtatgaatgatgcagcgttgaaccatctatggttcactagtattttcacaatttcaaatatatttttgtcactaagtcttgtgtatttagattcatcaattttaaacgattgctgaaattcaggtattgatctaatataataatttaaaatcaattgtatgttacaggttgctttcttttctatgttttgattaatctctggataagttttatattgatattcaaaatcttgtgtaagtataaattctatgtctttctttctcagtagatttaagtattcattaaagtgtttattataatttttgacttgtttaaatattaaaggattagattcaatttcatcttcattaaattcgggttcatttatcatttcattttcaagatcaaaatctaacaattctgaatttgattcttgaaattctcttttatcagataattgagtttgatttattatatagttttctaaattttccattgaagaatgtaaaaatgaattcataatgtttgataaattgttctttgtacaggaatgatttgacctattattatcaatatcattgaaattaccatcattaatattattttctatttctttatcattaatttcattattattattattattattattacaatctaatttagttttcattgaatactgtcgaaatattatagattgaaatttcaatcgtatttctatatttttagataattgtattggtatttttcgacatcgtaccacatacatattatttaacgtttacttttccacaatctctttagattggtttcttattactttgttgttctatatacctctaatatttcaaagagtttggatgaaatttgtagattaaagctcccctcttaaatttttcatgtctctgggaaatatcaaaaaattatgtgtccgtgcaccattcttacgtaatgatcttaacatagagtattacatgtttagcaatagtacagtatcaactgttgcaactgtatacatcgactaataggatcatatacaataaaaatacaaatacaaataacattacaatcaatttcattaattattttcgtttattgttttatttataggacaaattattatttaattatatcattaaattattttttttgaccttgagcagcaacagctgcagcacctgcagcagcagcttcaggatctaagtaataagctggcttaattggttttaagttatcatctaattcataaactaatggaataccagttgggatattaagacctgcgatttcttcacttgaaatgttatctaaatgtttaactaaagctcttaatgaattaccatgagctgcaataagaacagttttaccagataaaagatctttggagataacatcttgccaatatggtaataatctatcaataactaatgctaaagattcagtttttggtaaaacatttggatcaacattactatatctttcttcaccaaattgtgaaaattcagaagcatcttcaattggaggtggtggaacatcgaatgatcttctccattcttggaatttttctttaccatatttttctaaagtttcagccttatccttaccttgtaaagcaccataatgtctttcatttaatctccatgatctaacaactggaatgaaaagtctatcagatttttctaatgcaatattagcagtttgaattgctcttgataaaagagatgtatgtaaaatatcaggatgaataccagattcttttaataattcacctgcacgagcagcttcttgttcaccctttggtgaaagcttaacatcaacccaaccagtgaataaattcttttcattccaatcggattgaccgtgtctaactaaaactaacttgtgaaccatttttctatgtactttttataagatttctaataagatttctaataagatttcttcttactaaacgtaaaaatataaaatataaaaaagatttaccaattgaagataatttggggaaaactccagaattaaatacccatcagaagaaccacactttctatagtgtcaaccatcccggagagtagtaaaatcacctaataatcttcaatctgtcacacaattcggaatgaaaattcccgggttttaccattagtggaggcggcgtgtcgacgggggctcaccatttttaaattaaaatagagtagacaaaaaccttaaaatttgtagaaatctattcacgtttttcaacggacataatttaattaatttactgtttttactaaacaaccttgatgttagtaccaacgactgatcgttcgttgattgaacctttacagagggaaaattataatgtatgggggtcaggtatgagtcttgatgaatatatttctagagaatgggataattatggtactgaatacatgagatttgatcaaatgaagaaaggtgaagttggtgatgtatattttgtttggaaaaatgatgaaactggtgtaattgaaggtggttgtgaatttttcgttagagaaggatggttgaaaactgaaaatggaattgaaactattaaatgtggtacattaggatcagtttatgttttcgatgaatttcgtggtatgggaattagtaaaaaattgttagatgcatttaatgaaattacatgggattatttacctggtgaaaaagatatatcaatgttatggagtgaagttggtgataaattttatgaaagatgggggtataaagcattagcagaggaaagtaaactttcacaaaatagtaatgaaaatgataaaattgaatatggagaaacttttacaactagagatgatgaaaaaataaaattaatagcggaatcttttaaaatgaaacgatttgcagaaatgaatcaatggccattaaatacagttgttataattccatcatttggattatttaaatggtttgctagaagagttgaagcagttaatggaggtgttgaaagtaattttggtagatataatggtgataattggagagttgatattaaggatataaatatcgctagtgaacctgttattgaagaacctataacatcatcaattccaatggctaaaagacatgatggagttggagttaaatgggaaagaaggggtaaatggtgttggttttaagttttttctgtaatttgtataagttatataataaattaaaaaatataaataaaaaattgtcaaaagaaatttatatttttttaacattttatgtactttgaaattaaattttttcagttaaacttttttgtgaaataatagtaatttttcaaaaattttaaatcacgtgaccccaaattatttatttataaaatactataaaaatgaaaactcaacaaatccgagatagtttagtggctagaatttccgcttgtcacgcgggagaccggggttcaattccccgtctcggagtatttttttgatctcatttttgatttactaattgttatttgatgtaatgatgtactaataatccctacttataatatgttttttagcgatttaagaaaatttcccagaatcctaagtctatggtttccccctcaccagtatctcataaatatcacatttgtagccgcaatttttcactatccaatcatgtacttagtttttaatttcagtaagtattgactgagttatgaacgtttttagtttgaaatttgcgttttttgacaaagtcctgtaaaatggtcattaactttgagcacttcggacatagctcattgaaatctcctctcttggttgtaccggaaactttaccgttatattgcttacaaatagtgcagtatttgaaaaaagcttgatgaagttagtaaatttttttgtgctatttttcgacacttttttctgattttttaaaaattgggattcaaatcaaaaaaagtggctccatagtgcactaaatattgcttttctctttttaatgggactattggcttttttgtaactgttctattgaaaacataaaactgtaccggaattaataataaatcaccatacaaaatcggtgttaagccacaacaaaaagagtgtcgtgattttggtgaaaaaaagctctttttcaaaagaaaataattaagataattacgtaagattgtaaatttgttataagtagggattttacattttccaaagggaaatgattgtctacacgccgaggaggattaatagtactataaatcaattataataaaatcagaaatttttttttaacatgcatgtaaaacggtcatatacattttttcgattgtttgaaaaacattcatcagtatattagagctgttgattagagttcataaggccacatacgtgacttttacatacaatgcgaaaattataacataataaaattgaatagatattgtctttctatacgggaaatctgacgattatagtaaattttctgatcaatatattgccaaacgagaaacgttatattaaatctatgaaaattcacactaaagatacccaaagaggatgatataatgtaacgattttaaaaacacggggtaataaatgattcacagctccgatggaatgaaaaaaagcaaaaattaagcgccgtgaaatctcaattgtttgttatcttccctggggaattgtattctcttatatagtatatattacaacattataaggtgatgtctataacaggattttaatggttatatggtgattattatattaattttaatatgatgttacattaaattattaagctcattttgttacatgtttattacaatatttcatttttcaccacttcactatattttatcctatacacaactcctttattcccccttttaatttgccccattttataatatgcatctagtactagaccattaataacccctcaaaatacccagaagaggaaataaaagcacactaaaatcataccttatctactaataatttgcaccaaaactttgtatcgcaaccccactttgataaaaaaaatcataaaaaattgtaaattggaaaaaacctattttcttataaagacagcccccttccgcacttatcgtcctgatcaaaaggaatataaataaacctggctcagtttactttaccgtgttgccttcttctttgatcatttcttttactcgtttgatagagctatatcatactattaaataggactgtttctaccgagtgggatcctttaatttatttatttatttatttttatattaaaatctatttatccccctttgtttttctttattgtatattatcccactagaaagattatattaaaaatattaaaaaaaacagaaaagaaaagaatagaaaaacaaagctgaagccaagcaaaaatgtcgtatttaggtccaaaatcttttagtactatacctttaacctcttcaaatctagcatatctcaataataaccattcagatatgagttctacaacttcaaatgaaaattctaataatattaataatgttaataccccagtaactattcaaatcaacaataataatactataggtgaagcaaatattaatgatcacgatgatgataaaaacatcacttttaatcaatcagaagattttaaatcattaacatcaaatcataacaaacatcaattagaaactactccaacaatagattcatcttcaaactctttttcatccctgattgatcaatctttaaaatcttctgaaacttcaatggtatcaatacaggaatctcattctcatagaactttaatagatatgaatgacgatgataataaaacttttatattacctccacataacaatgattctcaattgttaatacctgaatctccattaagaaaatatgatgttgtatcggtatcaacggattccttacctttgtcaccatatcaaagtaattcaaaaaatgattcgaaagttaaatcagatgatgataataattctgctttaccaataccactattacggaaaaaatcaggtgaattaattaaatcctctttaagattaaatactttgccaaggtcaaattcaatgccaaatgctaaatctgttagatttgcaaatagattagaaaatgttaaattcttcaaaaaatcagaaaaaccaaatgctgtgtcatcagattctgtttatagaatgaaagttaaaactcaatgggattttgattcttcaagttcgtcttctccaacctcatcagataatgattatgattattcgtataatagatttagatatacggatgatagttatgagtatgattacgattatgattatgattataactataataatgatgatgatgaagaaaatactaataatatgaatataataaatcaatactataatcataccctagaattaagtgatgattatgataatttcctaaatgatgataaatcccaatcttcaaaatggttaattaaatcaaatgattgtccttataatccattgtctctaaattttgcaaaattatcatcaaataataatataatcttggaaagtgttaagctaaactcctcaggtaattcattaattggatttgtttatgctaaaaatattacatttgaaaaaataataaatgttaaagtaacttatgataattggaattcatttgtggaaattcataatgctaattatatatcatcaaatcatattttcaaatattcagactctaattcaacaaattatgataagttttcatttattattaaattagatgaattaaatgttttacatcaaaacaatttaaacctggagttttgtattagttataccgcagataacaattgttattgggataataataatggaaaaaattataaaatttcattagtgaagaaatcattgttgaatcaaacaaaaacatcatcgaaaacatcaaattcttcaaattcttccaattcatcatcaagatcatcatctagatcaaataaaactttaccattatttgaattggaagactcaaacatcaaattaaaggataataataattttaaattggataacttatattcaaaaccctcaactgatatcaatagtttaagatattcaaactcttttggtttaaaaaagattaaatcagaatcttcactcccttccatgaaaccgaactttaatttatccaataaaaaatgttatcacgaaaacaaatcagtttcttctttaagttctaaaccaactaagattgatgattttaaatcatcatctaccattccttcattattttcaactaacagaataccagtatcgaaatctttatcagcatcaccagcattaaagtcatcatcagcttttgattctcatcatctcagtgattatgatcatattattaaacaattctgtttttttacaacttcagattcaaccgagaataacaattgttataattatcaatatagtcataattttacgaacagcagaaatgaaagtaaaaatcattacgatattcatggatcatattcaatttctaatgataacaaacatcaaagtcagcaacatcaaagtcagcaacatcaacaagcaatatcgattgatttgtaatcaatatttctattttaatccaagctataccatataccaaattatatataccaggttaaataccaatttccaacaaattccagttttgacgaaacaacatcggaaattcaattttgaattttattttatttgatttgattagttcatctagttgattattctgcattacaaccaattaattacatgtgtgtttatacaccaattttttattcagttctttcagttcctccaaattttttgtttcattttacttcaatttcagttcctccaaattttttgtttcattttacttcaatttcagttcctccaaattttttgtttcattttacttcaatttcatttcatctaaaatttaatttattagtttaattttttcttcatttcacttcatttcatttctattgtatttctacttttattcatttattattgatagatacttttccatatcctacacatatattatgttttataaaaccgtgtaatttactttaatgcatttttacaattaaataaaccaatttattataaaatgaattttgacgccgtattacgtaaatacgattactttcagagagaaaaaaattctgacagataaaataaattcatgatactatggaatcgacgagaaatatattttttgtagtgtgaagagggtgcttttttgaagatatctgtatatcagtgataatgacatcaaccgaaggaaaaataatgactgaggaacaattatgtgagttattttcacaggtaggatttactgataagaagataaaggaaattgttaaaaacaataaagtttcaaaatcattaagtgaagttattaaagtttctggagtattggaaaataatacaactgaacatgatagtattaacgcattattacatcatcttgctgctttattaaaaggtaaagaagttaaaggcattgaaattgtagcaaaagcaattaatgaagaaaagttaaagagtaatttacaagttgctgaagcattaaaatatgttgaaaataattataaggaaggtgaagaatttaatgttaaagaatttgaagaagcatctggtgttggtattgaaattactgcagatcaagtaaaggaaataattgttaattttatggaagaaaaaaaggaagaaattgaaactgaaagatatcgtttaattccaacacttttagcaaatgtaagacaattaccatcattgaaatgggcatcacctgcattatttaagccaatcattgatgccaagattttagaaatgattggtccaaaggatgaaagagatgttgttaagaaagttaaaaagaaggatgataaatcaggcaaagataataaaaaaggtgatacaaaagctgttaaggcagaggaacaagttagaaatatgtttactgaaggtttcttaggtgatttacataaacctggagaggaaccacaaaaatgggacgatgttatggaaaaacatcgtgaatttattcaaggtaaagtctatacaagattcccacctgaacctaatggatttttacatatcggacattcaaaggcaattatggttaattttggttatgcaaaatatcatgatggtaaatgttatttaagatatgatgatactaaccctgaagctgaagaacaagtttattttgattcaattttacgttgtgttaattggttaggttttgaaccatggaaaattacttattcatcagattattttgaccaattatatgaattagctgaaaagatgattaattcaggttatgcatatgttgatcattcaactgcagaggaagttaaagctcaacgtggtgttaaacctgatggtacaccaggtggtgaaagattcccatcaccatggagaagtagatcagttgaagaaaatttaactgaatttagaaaaatgagagatggtttctataaacccggagaagcaactttaagaatgaaacaagatattaattcaccatcacctcaaatgtgggatttagttgcatatagagttttaaatgcttcacatccaagaactggtgataaatggaaaatttatccaacttatgattttactcattgtttagtcgattcctttgaaaatattactcattcattatgtacaacagaattttacttaagtagagaaagttatgaatggttgtgtgatgttttacatgtgtatagaccagctcaacgtgaatacggtagattaaatattactggtactattatgtcaaagagaaagattgctaaattagttaatgaaaaatacgttagaggttggaatgatccaagattatatactttagaatctttaagaagaagaggtataccaccaggagcaattttaagttttattaatactttaggtgttacaacatcaacaaccaatattcaagttacaagatttgaaagtgctgttagaaattacttagatcaaactactccaagattaatgttaattgaaaatccattaaaggttgttttagataatgttactgatgattatgaagaattaattgatatgccttataaaccaggtaatgattcatttggttcaagaacaattccattaaccaaaattttatacattgatgcatccgattacagagatgaaccaactaagggttatttcagacttgcacccgaacaaaatgttggtctcatgcgtgttccatttaacattaaggttaaatctgttgaacgtgattctactggtaaaccaactttaattcatgccgaatatttgaatgatccagcaactcataagaagccaaaggcatatattcaatgggttccagaatctgctaaatttaattcaccagtcaaagtatctgaagttcgtgtctataaccaattattcaaatcagaaaatccttcatctcatccagatggtttccttgcagatattaatccagaatctgaagaagttattaaggatgcaatgatggaacctgcattcttagatgttaaggctaaatctccattaaatatgccatttactgatgaaaagttttcaattaaagaagaatcaggtgctgaaaccgttagattccaagctttaagagttggttatttctgtcttgattcagattccactgatgataaaatcattttaaatagaattgtcaccttaaaggaagatgctgacaagaattgattgcttctttttctcattaaatactgtttatctctttataaagaatagtagttatatttttatttttataaacattttgaaccttaacagttgttccaacatattaaagaagtgagtaaggaaataataagttgacccatgaagtttactgggaagattaacattaacgcggtgggcgtaatgagaaaacttaccttagccgagaaaatactgaaattttttttctatttgaaatttttttaaattttttttttatttcatgaaatacttcatttcattcttgtaactggtttcaataagtataacataatgtcagataataaggtggctgtttccaaagactatgttgatgactctgtcacttttgatagctttaatcttgatccaagattattacaagctatcaataaattaggttttgaacatccaactttaattcaatcacaatcactaagattatcattacaagaaaagaaagatataattgctaaagcttccactggttccggtaaaactgctgcatattgtatacctattttacaaagtatccttgttgataatgaaagtaactcaaattctacaaacgaaattcaaagtgttgtcttagttcctactaaggagcttgctcaacaagtttcatcattttttaaagaattaactatgtactgtggtaaagtttcaagatctgttaatttaaatgaaattgttaatgatcaactcttatcatcaattttgaacgaaaagccagaaattttagtttctaccccgtctagattattatcaatcatagaagccaattccaacgtgaacttaatgaatttaaaatatttagttattgatgaagttgatttaatgataagttatggttatgatgaagatttagataaactaacacactatttgaacttaaagcaacacatgcaagttttcatgatgagtgcaacattaaacgaagatatcaatggattgaaagaaaaattctgtaataaaccagctattttaaaattacaagatttagataatcaaaacagaagattattacaatattatattaaaacaaatgaatacgataagtttttactcatttatgttattttaaaacttaatttaatcagaggtaaaatattggtatttgtgaataatctagatagaggttacaaattgaagttatttttacaaaattttggtattagatcatgtattttaaattcagaattaccaatcaattcaagattacatatacttgaagaattcaataaaaatgtttacaatttattaattgcaactgatgaatctaatgaatatgatgaagaagatggagagaatgaggaaaataatgataatatagaagaattaggtacagaaagtacttcagaaactatcaataatactaaggcaaatgctaaaaaatcaaaaaagaacaacagtaataaagaatatggtgttacaaggggtgttgatttcaagaatgttgcatgtgttatcaattttgatttaccaacatcatcaaaggcatatattcatagagttggtagaactgctagaggaggtaagaatggtatggcattatcatttgttgtaatgaaaaacgaatggggtaaacataaaccatcaagtttaccaagtgcacgtaaggatgaaagagttttcgctaaaattgaaagaacacagacaaaattaggatatgagatgagtccatatcagtttgataataaacaattagataactttagatatagaatggatgattcatttagatctattacccaaactgctgtacgtgaagcacgtttaaaagaaattaaaatggaattaatgacaagtgaaaaattaaagagacattttgaagaaaatccgcaagatttagctactttaagacacgataaagctttatcgaagattagagctgatgttaacttaaagagagttccagattatttacttccaccgggtgctagacaggatgtaaccaaaaccggatttgttccattctctaagaacaagaaacgtagtcaagggaagagacgtactggtgttaagaagaaggttgatgtcttaaagagacatcgtaaatagatatagtaataagttaatataattaatgtacacatgtgtatcatcttatcataatagaatagtaatagtttcctattcaggcaataccgagtcgagtgaatttttccaattttcatgttaaaccaaccaatcttacgtaaccatatttttttggttaatgctacgtgttcaagttcttcgcagtgaaaattttaaattttaacgtgttttgtgaggtttggaatttccatttgagatttcagttatgttatgttatttttgttttctattgtttagttttattcatttttattatagatttgttctttctgacctcttgaatgcctctaatttctctttacttgtattctattatcttaaaattattttcttgtagtaagtttttctaagttaccttcacaatggcaccaaagaaagctgcaaaggtttctaaagttcaggtagaacctgaagcgaaaacaactgaattaatattggaatccggtgatttaagacaatacccaaaatcagaattatccccagcagtcattcaaaatagaattgtacacacctacaaggaaagaatcttagtaggtgtcttagttctttttgctttgatcattagagttggtagtttgaatgatccaaacagtgttgttttcgatgaagtccatttcggtggttttgctaacaaatatattaacagtaagttctttatggatgttcatcctcctttagctaaacttttatttacattagtggcatttttaggtggtttcaagggtgatttcacttttacaaatattggtgatgttttcccaccaaatgttccttacgttttaatgagacaattgagtgcatttatgggtgttggtactatcttattcatgtacttcactttaagagcatctggctgtaaatcagctgttgcattttttacctcatccctgttaattattgaaaatggtttagtcactatctcaagatacattttgttagattccccacttatctttttcgttgctggtactgcttatttctatgttagatctgaaatttgcaaaccattttcatttgattggttcaagtacttagcttttgcaggtgtatttttaggtttctccctctcatctaaatgggttggtttatttactttagcttggttaggttgtgcaaatattcttcgtctttggtttgttattggtgatttaacagttccaattccaaagatattgaaaagtaccgcattcaggggtttacttttacttggtattcctgcaattatttacgttttcagtttctacgttcatcttcaattattaacttatgaaggtgatggtgctggtttcctgagttctgctttcagactcgactttaaagattcaactgtgccacgtgaaacatctgctgatgttggtgtcagttcaattattacaataaaacatttaaatactcacggtggttatttacattctcacgatagtttatatgaaggtggttcaggtcaacaacaaattaccctttaccctcatttagatgaaaacaacagatggtcagttgaattatacaatgaaacttctgaaccatttgaattcatcccaattactgatggtaccaaaattagattaaatcatattgttaccagtagaagattacattcacatgatgttagacctgcagtttctgaaaatgattggcaaaacgaagcttcatgttatggttatgaaggttttgaaggtgatccaaatgatgatttcattgttgaaattgtcaaggatttatctgctgatggtgttgcacaggaaagattaagagctattgataccattttcagattaagacacgctatgactggttgttatttatggtcacatgaaacttctcttccagaatggggtcacaaccaacaagaagttacctgtgcaactcaaggtgtcagacctttaagttattggtacattgaagataatgttaatatttacttaccacaagatgctgaaaaaactggttataaaccactttcattctggcaaaaatttgtcgaattacacaaaaagatgtggcaaatcaataacggtttaactgcaaaacatgtttatgaatcaagacctcttgattggattcttttaaatagaggtatctcatattgggcagctgcacctcaccaaatttatcttttgggtaatccaattatctggtggcctgcatcattcttatttgttgtttatgcattataccttgttgttttggttttcaaatatcaattaggttacactattgcattctctgatgctacatttacatttaactattacacattcagtttcttacttggttggttcttacattactatccattcttcttaatggatagacaacttttcttacaccattatttcccagcactatattttgcaattttagcattaggtcattcattccaattaatttcatctattttccaatcaaagaagacaattacatacttattatttggtttaatttttacatcttcattatattgttactaccaaagattaccattagcgaatggttctgattggactgttgaaaaatgtaaggcaagtaaatggtttgatggttgggattataattgtgaaaatttcccatatgaaaatgctgacaataatgcaccagcaaatgcaggtttcaatcaaggtggctatgattttgatgctgctgttaaacctcaacaaaatgcattccaaaatcctcatgaaaacattgaatcttctgttgatgaaccaattcatcacgtcgctgtccctgagaaggatgaattataatcatatctctaatttaggatttcatacttatttattctttctatcacatattattaaacaataggacacaatcctattatatataactgttttttttgtttatataaaatatcttatacaaaaattattaaaatttacacgttcatgaaaatagactaagtgtttttgcttaatgcatgaaattttgacaaattcacgcctttttcaattcatgaaatatatatgagccactttcattttggagttgtcatcaacaacaaattacatataccaaatcatagacatatataaatggcacatttggaaaagttagtttctgaagttgatgagagaataagactacagttcgagacagcggatattgataaaatcacaacagatgtacaataccttaagcagttcattgaaaattttacagtgctattttctacaagtcaagatgttcagactattcacttgataacgttgaatctatacattgagcatgaatatttgatatcaacctctttagaaatgaaaggatatttaaaaattttgtgttttgatttatttaacatgatcgattatgaactggttttctcagtcccgaaactacacagttatttcaataacattctgatggaatattttaatacttgcaatacactggaaagtttaagattatacgaagcttttatcagatgctacagcacaggatatttaaatggaaaactatttttttttgaaatccaaacagtaaatcaattatttaagtgtgaaatgtatgataacatcaacgatttaatcgagaggtataaactttatgacattaatattgattacattgagaaatgcgctaaagaaaagttgtccacttactttcatcaattgggatacacctgtattctcattgggtcatatcaaaaagcgtatgacttattttttgtgactctatcaatatcagtggaagatgctaggatatgtgattttcaaatgatattatctgagtttgtactcgtatctcttcttttgaatgaaatcggagagaagataagctttccaatactgaaatacaagaataaaataaatgctcaattaatggaatcttatcaaagctaccaatctcatgatgtatactcttttgcctataatttttatattcatatgctaaaactccaggaagatgataacatgattttggttagaattttcaatgaacaaaatttagtaaaactgattcttcaaattattgaaaataaattgaaagtgaaaaatattaagagctcagatttgaattataagaatctggttgagatagaactcaataaagtttttacggaattggaaaagcaaaaaattaatgttcctcaaatacccatagaaataagaactactaaacaacagaccaattctgaactgttgttatcggacgccaaacaaattatgcagcaaaaccaattactgaaaaaaatttacagtcaaaagagccaagaagaatgaaagaattgagatcttttatcttaaaagtaattatacagttttatttacattcttttatcaaagttcaccataaacacctcttctctttgtagtatcatactttctgacaatactttcttgaccttcaacttgtgaaaatgcaaaacctctttgttttttcattctatgaacttgtctaacttttctaatagttttttgaaatgaggaaaatttaggtctatgtgcttgaatttgattcttttgcatttgttgcacaatatgatggaattctggattccattgtcttttatagaatttatagagaaaatctctcattaaacataatgcagggacaacaataatagataaccagaaaacacatgaaccataaacaaatggcatgattccgttatattcttttgaaacattaactttaggtgctataacggcatatagtgggaaaacaattaaccaaaccacaaatgaacctggaattgccaccaatgtaaattttgtccattgagaagaaactaaagcagctttacctaatgatgttaacaaacaaacggaatacaaagtaacaccgacaacccaaatacctgcaatttcaccatcccagaattgattaccatatttatagatattgataacagaaatgtagatgattgcactatgatagaaaccattaacagcccatgaccaaaaaatttcaacattgaagaagtgtccttcttgaccaattttgtaaagctgtggatattgattcagcatatttgctgaaatatattgatcaaaaataccgatgacaaaaggtggcaacgcaacgaacataacattgtataaggttaaggaccaagattcaataattgattgcccactaaaaccattactgaaaacgaaccaaaattgacacatgtataatgtaatatttttgtagaatgaatatagaatagccaatgagattctttgataagaccaagcaccatgaactaataacaacttctttaagaatttaaattgtccgatagcaaaatcagcactccttgatgcttgtgcaccttccataccactgataccaaccccaacatgtgcagcttgaatcattgaaacatcatttgcaccatcaccaatagctaataaaagagccttcttctttcgtttaaccaacttgacaaccaaagctttttgcaatggtgaaactctacaacaaataactgccttacataatgtaccaatttctaagaacatatcttctaaatcagattctaaagcatatcctaatgatttaccatcaataactaaggctaaactacctttatcttcttcagataattcattaccattcagaacgcttaatttttcaatcatgttttgacatgtatcatctttattatcttcattgataatcaacaaattcatatcttcactcaaaagtttacaactcataccaacattaatagcggtttcttgtctatcaccagttaaaacccaaacattgattccagcctcttgcaaaattgaaatagtttctggaacaccatcttgcaatttatcttcaatagcagttgcacctaaaaggaataaatctttttcaataagttcagcagctttatctaattcctctgatctgtcagttaaactaactgaagctttgttatatatttcggaccattggttatattcttcttcactgattgttctagttgcaatacataatgttcttaaaccttcaacagcgaattcttctaaatgtctagtagtggcttcgataaattcattatcatcagataatctttcaaaaataacggtatcagcacccttaacgtaaagtctaatctttccatcgggacatctgaaaagagcactcattctttttctagtcgagttaaactcacaaatgttaagtaattcaaatgttaaattttcaccattagcttcaacaataactgaggaaggctttctagtatggaatttataacctaataaggctgcaccttcaactagtgcaccttcatcaggggatgcagcttgatatttaatttcaccattatcttgaacttcaggaataacagtatgacaaactgataataaagttaaaaaactatcaatgacattcttattattactttcgtgtaaatcttttttcatttgatcaaaattatagtaacccatctcgacaccatcttggacagaagcctctttatcttcaggaatgctttctatgtaacaacgaccaccaatggagcaagctttatattccataatatttcttgtaagagtacctgttttatcactgaaaacatatttaatctgaccaagctcttcaactaacgatgaagttctaacaattgttggagtatctgtttcttcacaatacatatctaaatccgaggcaatcaaaaatgcttgataatacttgataatttctacagtaacaaataatgagattggaaccaaatttgaatataaaatccagtaagttaaaatatccaagaaaaacaatccaattttatttgtaccttccatgtataaatagcctaagttctgtttattaacttgaagtgtaataacattacccaaagaagagatgaatgctaaaaagatcaagattccaaataatgcaacaatttgtaagttgataattctttcaacatcagttttcttgattggtgttgcagttgcatttctcatcaatttagtttgatggccggtgaaaatgacaataccttgaatccaaaccgtgtttcttaaacttgcacctcttaaaatcatttgatcaggactcaatggaaattcattaccattaatttccatagtaccttcataagtatataaactactattaggtctttcacttgttattttaccctttaagttgaccaatttatgtggatctattaagtgtaccgtttcttcacgaggttgtttaatttttaaattagtttcaccatctaaattagcagtttcaatgtaacataatccatcaggttcagaggagtttaacaaaattagatctgcaggaattaattctccattagttattttgacaatatctccaacttttacattaatccactttttggattcatattcacctgttttagagtttaaaattaaaacttttgatctatttaattcgttatcagatgaatttctctttatatcttctgacatttctttcacagcagaaaccaataaaacaatcaataatgttgcaatagttgtatatctattagttggtgtaacagttggaacttgttgaatacatgatgtgaacaaaaagaataaattagcatatttggagaattgttcaaacaagaacttaggtaaaaaagtaaaagcattatatttagttgtactaatatgatttgttgggaatttagccttagcattttcatgtgaatcgtttaaataaattattcttggaccttgatcttcttcaacctttcttttacctaaacaccttctaatatcaaaaatattcatatcaataggttgagaaggagtttcatcatctggtgatctattatcgtgtacattagtatcatcaatatttgcatcatcacctcttgattctatattaacattattataatcagttaaaccaaacttccctttcagttggttgtaaacatttcttaacccagttttatttttaggtattgctaaatcatttaagcttgaattaaatgggttatcattaaatgcattacgatcatttataattgtatcatcaacatcggaaaataaatcactcatattatcatcatcacgattattgttattattatttctgttactttgattaaatgtattcatttcaatcaaattaacatcactgaaaggatcgtctttagattccttcagaggcttataatttttatttgacaatccaaaaatatcatcatcatcatcatttatttcatgatgatcagcaaatggatcaattaaagacgcatccgttaattttgagttttgttgcctaccacttaatttagaacttgatgaatgcggtacatattgaacatcatcttggagtaggtttatggaattattatcctcatcatcatcatctcctataacgaacttgttactataactcatatctgattaattatagaacaactgatatagtaattgaagtgttatccagtagaacaagtagcaaagtttgttgatttaaagaaaattagtcaggaaacttcaaaaataaaaatgaatagatcgattaaaaatttatgttgatagtataaattgatattttcgttacacgtctttaatatttgaaaattaagttacaatttataggtttttattaatattttatgtaaagtataactatctgtatagtataagaaatagaggacaaaatgtttttaaaatagaattcactatatatactaatttaaggtaacattacattagatttaagcttgaagagcaactctaccctttgggttggtgaccttaacaccaatagccttagctctggaaaggatttcaactctgttctttgcagaaacattgtgtgcaatttcagctgcataagtttcagtgtgtaataataaaacttctaagtcctttaagtttgagacaacgaaagctttcttaccatctggtcttaagaatttagttttcttgttagaaccgtaaccgatttttggagcagaaatggtacctctgaatcttcttctgacacaagaatcaatacccttttgtaatctccaactttcaccaactctgtggtatctgtctgaatgatgtctcttgaacttcttagtgtgctttttgacaatctttgggttcaattgtggagccatctataattaattaataaattgaatggtaatgttagtattatgtttctttaaaagaaagaagtagaataaaatgaaacgagttagaaaaaaatagtcaggtattaatttttcagtgatgattgttatgaaaatttttcaatttataattcgataaaaaataagttaaattgatgctattattgatacgcaaaagtttactaaataacttatattctaatatgtttattcaatatgtatgcttgatattagtttactatcatagtcctcttgaaagttaaaaaatttgatataagtaactttatgtatcaatattgtagagattttaattactgtgattcatgtattgtctgtacaattactttcagttatctgtatgtaataatcattatctatatcaatattactatcaatcaataattagcattaacattcattaataatcacattaacttaatacattcacttatttctaatctcactttgtttcaatatgttaacttctgatgttatatgtctaatgtttaatggatagtacttactgttgatgtctgttgtgtattgaaagaaggattctgtaaagtaatatgaaaaatatgaaaaaaattaatagattaacaaaatccaacagtgtgacaaaaattgaatttcctcatactaatttcccttcctctctctcactccctctattttttttttcgtccttcacaacttcccttcaatttctcactacgttttttccacccttgagctgatccgcgtgactgggatttttgttttaaagttttttttccaataatttctcatttgggaaagtatacaccgcgcaccataaaattttctaaaataaaagggttcaaacttttggacagccctacttacacacacgtgacggacatcggataagttacttttttaagaatgtaattttttttaaaaagatcattacgtaatatattgtaaaacttcatgtacacatgatgcatgattgcttagagttgcactgattattgagagaaacatcgtaataaaaggattttgattgtaatatagtagctcaaacttatttgtttaaataacaattcaaatatttaaatgccgaaaacaacacctcaatctaatcaaacattttattttatcaaaacagacgaaaaattacctcaattaaaaccttccttacacgatgatatgatacgaatgtatcaattagatgatttagcaaatgcattagcaagaacgaaagctgatggctcaaaaggtgttaaattaagaaaatcttataagtctcatatagctgatttacctggtaaacatacgattccaactgaagataaaagttttactcatattgcacttatgcctgataatccagattttacaaagccaaaaattgaattattctcagatgaatatcttgataaagttataaattttgaaaaaactggttcaaatggtataccaggctttgattcaaataaattatcattaacaactattgatccagctgatttgaaaaaagaaagggaaaagaaacgtaaattaaatgtaacttcacctcctgatcaacaacaaatacaacaaccagaactcaagaaacgtcatgttcaagttaaattcgattgaaattaacaatcattctaattttactaaactctataaatattacataaatatttctttactaaataacaaatcttttttttatattaaaaacttaaacaaatacccactaaactttaccttgtatttgtctaatatttcctttaacacttctgagtttattaactctcttctttttcttaaaaacaaataatttattcttaattaaacgaccggattgttttaatattgtcttgataaaatgctttttaattgcattaattaaatcaattttagtccacagctttcttttaacaacaaattttggaattgttaaacttaaattcgtaacattgattagtcttaatttaccctttcctgaaaatgtaatattaacaagtaaattctcaaattcaagtctactaatattcatgtatttcttagctctatcagatatctccaataaatttttaggatcttctgacatatcagaaatagaaacttgaccattcattaattcttcaattgccgatgatgtattgattagtttactatcaacaatacttttgttcagcttggtagaatattcactacaaatattatttgtagctttagaaatattagttatcattgaagtattactattcatctttttcaaggcagatctatcatttaataaactttccatttcagcatcatctgagtcatcacttgaactaaaataactttcaatatctttctttgcatttttataatgtacattagtattatcgttatcgttatcgtcatgttgaatgttaatacttggcacatagtttgctttctttgtttcatacaatgcgtcctgaaatgtgtctttaccattaaacagctcagtaggtgagatttgaaagttaccatctgattttgtatctatacttgttctacttatacttcttgaatttcttttaccaagttgattcaaataatttttaagacttccatcatccatattatcttccgtttcactttctgtttcactttcgtcatcactcacatctttatcatcggaatattcaatttcattagggaacaagaatttcatcaacttatctcctgtcttttgctcaatacttaacttcataggatgacataaaattttgacatcccttatattattcataccaccaattttctctcctagattccagttaattttaatcatttctttgactttcgattctttattctctttatatggtgctaataattctggatatagaatatcataatcttgattaaatattgcaatcttctcaaccaatatttcattctcagtagatttatcaagcatttctaatcttgaaaacttaaaatcttcaacagcaaacttcaagaaatcaatatcattttcagtaaatacaacattaatattatcacctttaataacccattcaacaaaacatttatcatcattagctttatgttttggatcacattccagtaaaataattttggataataataatgaatgcgtaaaatttttggaaacaatacgatgtaatactttgtcaatatcaggcagttcatcgattgaaactcttgcagcagataaggctttatacagatgaattatatcaaatgtctcattacaaattttctccaaactttcgaacaacttatcagtttgatcacttgttgcaagtgagacagcttggaccatttctgcaaatttcttctgttgaggtgatgaataaaccataactttttggataattcttagtgtttttaagtacgattctgaatcaattttagtttcaaattttggaacattcaaatataaattatttctaaatttagtaccagcatatgtattggaagctttttcaaaaacaaagtaaaataaaacatcagataataaagttttctttttgataaaacttgatggctcattcccactaaggaacaccggccatgaagagcatgtaccataatgatcagcatcaatattgaggtcagcaaactctttttgagaaagaattaacaaatctgcatctttaaaaatagtaccaaatctttttgctatatttgcagatttaacgtacttaaaccaatcactatccatcaaagaaataattttaatttcattatgttgtgttctaaataaaattaaatcagaatctgttggatcaatcataatttgaacctgaatatcatccaatcttacaatcatgtcatcaacgggaacaacttcactaacatattgacttacatttctcaatgccttttcaaaactttcatcatcctgaatttcaattttacttttctcttgtttaatcagttctttcttagacatatcatgatcattatcatctgcactttcttgcaatttcttagaaattgcacttctggccttaaatgatgtactataaacataagcagctctgaattccagttcagccaaatattcaaaaatcaagtttctagaattacggtaccatttgaccttcaatgaattaacatcaaaaatatgattgaaattaacatcagggcggttatcataatcaattagacaatcatgagaatcttcattaccaaatttactactattttgagtcttattcatccagtaacagaaattagaagcatgtaacaaaggatatatttgtccataaatatcacaatttccaatatttggcagatcaatttcttgataatcattcacatctatccaactttgatcattatcaaaaatttcaaaattgtgtttaggtgaagatggattaacagcattaccaaatttcaatccaactacacgtaaatcaatatcatccaatgcgaccataccaatataaaaagccattttcataatactgtacttttcatctaagaaatcaacctctttaaccttcttctcttttctctgatgtaaatcacatttaaaacttgaaattttagcctttagactgatagctgttttattttcaggttttgataaatcaattctataaccatgacagatatacaatggttgaatatcaaacatgaatttgaaagtcattaaatgagaacccaacttgacagatttattctgtgatccccaaagattaccagttctaattggtagtgatggatcatcagagaatcttttaaaccatttgaaaaacataagtagtgctctaggactcaatcttaaaatattattcgttgaattttttgcagttaaacctaatgacatatgtatataatctgatctgaagccttcatatgaatcatgattagatttatcttcaacaaattcaggagcacacaaaacattttcaaaatgtgatttaaactcatgagttttttcaccatcagacagtctttgaaattccattgacaatttaagttcaatatcaccatctaaacatatattttgtgatttgaatatattatttctattcaattcatataatttttgagcttcaagattatctccaaaatataggtcagtatttaaataataaccatagagagaagataaaaggaattttggttcatcacattgcagaaaaactaaatcacgagaacaccaacatgggagtggttcaacaaggaaatttggggttccaaaaacaattctattggatctgaaaatgaaataatctctttctaattctctatttgggtcatttattaaccattcaacattatcagtaaacaataaggaaaaaccagaacgaataccaagaatatcatatgggttggatgaatttaagatattgattctaacagcagtgctatcatttaaccatctgaatttaatataaccatgtaagatatttcttaatttatcccatgtacccaattttggacttggatcttttgatattttactaaatgtatcaaaagttaaacttacttgacgtaaaagagcttgataagcagttgaccaagttgccattgtaggagtatcagaatcaatttgacattcaatttcataatatgttttaacagaagtgatggtttttggagcttcccatgaataaaatttgtcagtagcttcaccttgagttaagttttcaaacattggaatatataaatagtaatattcagtatcagactgtggaaactgttcagcaattgcaagtgttgatttaaagacaaacgtattagaccatctatcagaagatttggaatttggaatataaactaatggtaaaggaagatctctaagatgcactctaacttcagatgcttttataactaatctcatcggaatgattttgtcccaaacagtatccttaggaatacctttaccaacacgatgtaaaaactcatgaacatcaccaccatcatctttatatttaggaggtgcaatagataatctaaaatcattaaacattaatcccattaatggaggattatcattgaaatcaaccatatcagcattaaaaccatcagaaacaggtaatgtagaactaagaataccaattaagaaatccatattcaatgtaacaacatcttttctcttgttattaaattcttcgacagtattaaaccaggatttagatatattaactcttagaatatgtaattttttagcacaatcactaacaatcttacggacatcaggatcttcaatttgatcgtattcagaatgaaatgttgatgatgataatccatcgagatatttactcaactccttaaattgttcatgtttcaaaattgatttataattaatttttaattgcttcttaaagttttcaaaatgttctaatttcttaagcctagctgcttgttcaagtaaaccaagttgataatacataccaattttagcttctaatggatcatcttcaagatttaatgacattgcatctgatttaacaatcatttttggtaaatgaataacaccagatggacttgctttatcacgacaaccagttggtccatttttaatagatttaataaatttcttagttaatttagcaaacaaaataatggaatcaaataaagaatgaacaacaaaattggaaggaacagaaatcttaatattggaatcaacaaaggtgagtttgactaatttatgatctttatttgggaattgacaagttaatttcatattgtcaaaattcataactttattgtaaaacaagctatccttagtttttttaacagataatctaatcaatttatgatgcataaccattgcattattaaatgctgaaccttttaaatcatacatatcaattctcaaatggaacaaagtaggcatgagcaatttaacttgagcttctttcaaatgccatttaatattaaacagtttaaacttagcctttggtgtatctgtctctagctttttggaatattctttaatttgtttatcgtgttctttctttttattaaggtctgggaaatatttgtttctattatatgccattgcatttttgatcaaatagaaggccgagaataaagtaaaatgcgaggtaacactaaagtcaattttgatagtttcaattgaattggtaatttcataaacattggactttaaacaataaacagtgctattaatggtaggaattgataatagtttctctttcggcttgacaccagtaagaggattttgcatatatgatttgatttgtatttcaccaatttgattaaatgcataccaatagtaatcatcatcagaaactttcgatttagttgagaatccagaaagagtcatattatctgaatcattttcactttcaggtttagtatcctttgctcgtactgataatttaatagattcaattcgaaaaacaatacttgaaggtgtataaactttatcgttagcaaacatattttcataatcagattcatccagtaatttttcaccaggcataaataatgattttgaacccaaaactactttaaaatctcctaatgataatttgacttcggtgaaccaatctggtaaatctctaaacaacaattgaacattttcctttctatgtttaataggttctctgactaatttatgaggctctttgtgcttaaacatttgcagttgtaatgaattcaatataattgaaagaccattcagaactttaagatctgtcatattcagcatgaaagaaccaaatgaaagtgaagttttcatattcttcaatggaagcatattgcagtctaacttaaataaaatgtctttgattaaagcaaatttaactgaagatttgtttaaattatttctttgataaatcaatgaagtttcaggaatgtcaaatctacaacttaaactcatatttgttttagaggctgaagtatctaattgcatacccaataatgaaggttgaaagatgaataaatgcatatcacgatcccttttattttcattatctgaacgaagaataatacttggtttttcaattaggacgttaatttgaacagttggtaatgtttctaatactaagttgatatatctagtttttctttccttttcaatatctgttagttctaaagatttcgtattatcactattatcatgaccttcaccattagcatgaagttcctgttcagcttgcttattttttttgaacaatttcatcaataagatcaattgttcaacacttaaatcaattgaaggattagcaaatgtaagttgtataattgaaatagtttgcttcaaaataaaatcgtcttgttcttcatgattaaaaataactcttaataaattattcatcatcgtggattccattgtgaataaaagattaggaattgcaataacttcaaaacttttaactttaccagtatattttgtcatttttgtaaaatctaatgcaagtttaaaattggttaatgtaatcaatgattgtaatgggaaagagtcttcaacaaatttcaagctgaaaccaacttgattaggattaattggaccaatattaaatgataatgtatcaagactgaatgaaactaacgcaacatcgtcaagtgaatcatcattcatggtagcaatgaatttattcaattttttagtagaagcaattggaatatcagtgatacgaacagattggaaactaaagttgacatttttcaataatctggcaaaaaatccatatatgtacattttaactagtgaaatctttttaaaacgtggagctttttgagagttttcaccatcatctatatcaaattgaaaatcaggattgaaagatttgaaaattttcagaatgtataaaatggaaagatcaacaccgacaattctaaattttggttctaatgaagtaataataccagtatcagggttaattttaaaagtgacagaagttgaaatactttcacaaaacttggagataatattatcagttttatgattataaagataaacattatcaatattgagagatgataaccaagttaaacgatcactagcaacttgacttttcaaatatgaaactttaacatcagaagtatttaaatcagtatttcctacaattttcgatgaaacaattgaaagagatgaagatagcagaatagtagtattttcaatattaaatgaaagatgaggtagatatttgaataagaatttagttaatctgtttaatttttcatcttctgagtgaatggatacggatgcattgggatcatatttataatttttcaatttttcaagtaattcaacagtttcataagattcaagagcatttttcttttcattagcatcattgaattgagtaattgacttagcattggaagaagatgaagaagaagtattatcattgttaacttgaaaatctttaacattaatagttatatcagagatggtagttcttacgtaagtcttaactttactaaataaagttaaatgaaactttattctaccaatattaattgaaatttcctttgattttgaaggagtataacttaaaccatgtattgaaaatgtgaaaggattaatgaacgtaaaacttaaaccaaataatctaaaaaggatagatttaaataaataattagcacctaaaccaactaaaccaccaataaacaattgataagatggtatggttagcatgactagtttaagtatagtccaaggaagtagtataaacgctttcaaacaactgaacagaaagttgaataaaaatagaatcatactgaaaagtaattattgatgtaaaacaatgtgtagtcaattaatcagtaaagtataagagtgttatgattggcagactaactgatgaatacaatgattggaattgtacgattaaaaaaacttatactatcagtagtaattcattataataactatcattcattaacgaaaaagctatcagttgacaacttatatataccaaacaaaaagaaaggaattaaacttgctattgtctttatttccttctccgaaaatacaaggcagtgataaagcttaaaattgtaatttaaaataataggggaaaggtatgctcggaaaattagaatgtaagagtagctgaaattgccgaggatacttttatttttctcttagtgaggtggaaaattcaaattggaagaaatttatttttttagtaggggagtatagtggaaaatgaaaaattttaaatttattatggtagacagttagtaatgctattatcatttctggttttgattttgatttttgattttaccctgattttatattcagatcaagagttattacttaaaccaaaacactttatataagctaattacatcatgcctccaaagaagaataatgttaaaatggatctttcatccttcttggataatttcggagaagctgaagattcttgggcagatgaatttgatccttcaatgttagaaactaataactcatcagttgatgttggtgttagtattgatatcccaaacaaggaacctgaaattcctgatgctccaccttatactgctagaatttcctcattacctgatggtgtcgaagaatttgaaatcaaagatttctttgcaaaaggtttaaaagtttcaaatattgattcagttcttgatgatttttattgtccaagagatcatgatggtaatatgaaacattttgctttcattactttcaattcaagagaattattagttgatgcattagaattaaatcaaaaggcaattaagaacagaccagtcactgttggtgttgctcacccttcaaagaaagaaagagcgccaagaggtaacagacgttatgaagatgataattcattagattggggtgcagcaagaggttccgctactccaagagaattcaacccaagttcattcagaacttctggtccaccaagagagagaagacgtgaagaaccagattttgactggggtgcagcaagaggtactgcaactccaaaggaatttaaccctaactcattcagaagttctggtccaccaagagaaagaaaaactcaacctgctgatgactttaactggggtgcagtaagaggtactgcaactccaaaggaatttaaccctaactcattcagaagttctggtccaccaagagaaagaaaaactcaacctgctgatgactttaactggggtgcagtaagaggtaccgcaactccaaaggaatttaaccctaactcattcagaagttctggtccaccaagagaaagaaaaactcaacctgctgatgactttaactggggtgcagtaagaggtactgcaactccaaaggaatttaaccctaactcattcagaagttctggtccaccaagagaaagaaaaactcaacctgctgatgactttaactggggtgcagtaaggggtactgcaactccaaaggaatttaaccctaactcatttagatcatctggtccaccaaaggagagaaaggctcaaccagctgatgatttcgaatggggtgcaagaggttcattattaaaacaaaaaaccgaagaagcacaaaagaaagcagctgcaaagccaaaaactaataataataaatctgaaactgttgtaacaaacggtccacaaaaatcaatgttcagtgttttacaaaatgatgaagaagaagatgaagaggaagtgcaagaagaacaaaacaaagatgttgatgaagtcaccaaatctactgcaaaactttcagttgaaggtgatgaatggactgttgtttaattatagtaaacaaagtttcatttttgaatttacttacttgcttgtcactaatattattcaataattctaattgattagattatcctttttcttaccatttttatttcatatttttgttcttttccttttataaacttcattttgttttccattagatcattttttttccaattgtttcatgttcatattatactatacgattttcattatcatcatactatactttatatttcatttcatgtattattaacaaaaatttgggagtttgggtcattcatattgcatttgctgttttatttgcttatctttttcaattccattaaatttacttattacaattgattttatcattcaaactacaatccaaaattagcaaatattttagaaagtcttaaagaaatttacaataaacttaacactcaaatacatttcaaatcttaaaattaatacagattctcaaaaaaactttacttagataaataatcaaactaacaatttttataatgtatagtagtaatttgtgtatatgatataataaacattcatgtccatctagtccatcgatacattatcagaagtacttctatcttgatgcatatcacaaagtataaatcataaaaatcgaaccctcgccactgtcacgtgaaccacaaaattaaaaaccctgaaattttttttcacaataaaattttttttcatctgtttctcgtcgcttgtagaataagttttggaaagtagattaattttcaccctactatcataacctttttctcctttaccttcagcaggcctaggctatagttagattcactttaattacatcaagacaaaatgggtagaatgcattcaagcgtacgtttcccttttatttgaaaggaaaatgattcaatatcgtttcctttcgataactaaactgatggtttaatacgcaagaaatatggaccaaattggtagatttaaccattatttgattcccttggtatattcaggaaaacattgtttatgcgtccttcagtttttgatataatatctgaaattattgtctaacaagtgatgttgagaaataattttaaaactgaagtaatatccatagatgcatttgcatattttttcgagtatatttcaatattacttataatgtttgttaaatcaatatacgctgattggtaccagtttgttagtattaggtttaaaggtaataagtttattttgttcttttatactaactctagattttttttctactttttgtttaatatagggtaagggtatgtcatcatcatcccttccatactccagatccgttccatcatggttcaaaggttcatcagaagaaattgttgatcaaattgttaagtacgcaagaaagggtgttactccatctcaaattggtgttcttttaagagattctcacggtgttaaccaaaccaaggttatcactggtaacaaaatcatgagaattttaaaatctaatggtttagctccagagttaccagaagatttatacttcttaattaagaaagccgttgctgtcagaaaacatttagaaagaaacagaaacgataaagattctaaattcagattaattttaatcgaatcaagaatccacagattagctagatactacagaaccgtttccgttttaccaccaacctggaaattcgaatccgcaactgcatctactttagttaactaattgtgtttgtttaatcttttatatatcatacatttaatatttaaaattaataaataagtacatctgtctctacatatatggaaattacctttacatcgataattaatttaatcgtatcttggtttatagaacttgaatttttcatctttatatttgaaggcaattggcgtaaaatcttggaaatttaaattttcaagtttaacatcaacatcttcattcaatggttccacagttgatgtgtaaacatcattagtatctgtaaaaattcccaatactatatcatcatttgaaactcgaagtcgtgatttatcatttatttctgtactagcagattttgcctcactattttcaatatcgacttgctgccctatattagaatttgtatttgaatttaaatcatcatcagcatcagaatcagaatccgattcatccaatgcaatatttggtatctcaattttatcattaacatttaattcaccattctcatctaaacttttaagtgaatcatctatttttaatccattagttgagttaatcatatttactagacatgtctttaactctgatactgtttgatcagacggtatttccaccatataagttgtagattgtcttttcaatttaagtattagagtatttataattactttcttaggtggcataatgtacttatctgtcccttacacagtgaataacgtacttctttcccaaacattttaatctatataaatttcatgacattaattaaaatatgaagaaaaaaatacttggtaacgggctcggttgaccttcccaatcaggatccaaaaacatcacaaaaatttttcttatctccattattattaataaattattaatttttattatcagcttattaagatcaacttaatctgatgatgatcatcttcaactgagttatttctttgtaattatttattactctcttactgtaaagtcttttgtatactcatataggcaagtttaaagtataatgtctggcacttttgggggcacaggaactactgttgtctttgcgattgttatcgcagtcgcagttgttttagttttaggcatttctgcaataagttcaaaatatacattccgttcctggtatggtatctatgatccaatatctcgttcaacttcaagatattcttatatgacagatatgaatggtgaaacaagaatactacaaccatatgtatattataatcatgaatcattttttatgtttggtaatgaaggcttgttatcaagaagaaataaagctcaaaaaattaatgttttaacaaaaaaacaattgaatgaattatttcctttaaaaacttataaggattggctaaatggtgggaaagaagaagttcagaacttgagtgttggtaaagtgggttacgctaaagattttgaaactaaagaagttgaaaatgagtttgctactgagaccgatataactgaaatgaaaaaacaagacttaacagctaagaatgatagtaagattgagatcatggttgatagtgatgatgttgatttagaaagaaatcaaccgatttcagtgataaaggagaattttcttgaaagaattatatcaagagtatctggaaggtcaattgttgaagagatgaatgtaccaactgaaacagagaaacactttacttctggatcttgtgctatttgtttagagaatcttgaagatgatgaagatgttagaggtttattatgtggtcatgttttccatcaaatttgtattgatccatggttaactgaaaggagaggttgttgtccaatatgtaaaaaagatctctatatggaagtttctcaaattgagggacgcacagataataacactcaaaccaatattgatctaaatatgaacaatattataaagttaccaacaggggagccgggcttttcaacccttgattccatatttaacatcgatccaaacaacattttttcatttttcctgattttgataataactcgtgttaaagctcaaactttactagcagcactacaatatttacgtcaagattcatattctttgagtaccggtgaagatgaaagttctgatgttgaattacctgctgataatctgtcattaaataaccaattcaatgatcatttcggtgctgcaatttactcacaacagatagctgataaattcaaacaatcactcttttcggaaagttttgaaaaacctccaatggtagatctagataatttaaatgatcaaatcaaaagaattgttgaacatcatccaagacctttccatcctgatgatttacaaaatttagattatgaagcttggaaggaaactaaaaagatgaacattttccctaaaaatctttactttaagtttttgaatatatcaacaatacaattatactactccaatattgtcaaaatatatgaaaggagacgtaataatcgtttaaatcaataaaccagcttaactttaaattattacttatcacttttttttgctttatttctaatttttccaaacttttctttgactctttttacttcttttaatacactcaattttaccctttttcatttttatgctctatgtatacaaactcattaatctgtacttacaatgatacaatttaaaaattaaacattttatattctatttttcaattaagtttttcaaatctggaatatcatcttcatcagaacattctaaccatatattacaaccaacttcctttttaaacaattcaacagatccggcatacaacatttttatatcacccttggcagtatctggtctccaataaattccaactaatggacttgtatatctaccatcaggttttgtatatccataattcatcagtacatagcatggtgtgttatctggtaattcatcaactaattcatcaaaagcttcaagatttaatgattcatccaaattaatcgtttgttcatttttattaattttgtaaatttgtgtaggtattgttgttgatgattgtttgattggagttaatcgaaattttcttaaactttgtttagcttcagttggaattgtgcaaatagattgtgacattattatcaaatggtttgtatgagacaataaagaagaagagttatagtactaaattgtatacagcatttcggaagagacagacgtacaaaactatactgcgcgtgggttaactatgcaggttaattaattccagttgtcaggtgcatgatacggacccaattttccattaatataaaagatatagagttataaaaacatattaggcaacatcaatcatctaaaccagctagttctgcttcttcatcagcagttgctctttgtttcaatactaaatcatgacccataattcttttataaatatctttaacatcatcagttgttgattcgaaatgtgatgaaggatcataagatttagaaataaaaatattatcagattttccatcacttaaaggttcataaatttctgcaatacccattaaaatatctttagttggaccaattattttaaaagcaggttccaattctaaatgaggtttatcagtttcaataattgttgaaataattgctaaataatgattctttgaacaaacattatgagcacttgataaaactgcaatataaatatcatttttacgattaacttgattttgtggaattataatttgtgcagaatctgcatcatttgtatttggaattggatgatctaatatacacattgctcttataactttttgacctgttgctttaactttttcaggaaaataagttggatctgcaataacaattggagcatttgctataccttcctttgttttaacacctttaaatttattttcatcatcataataaatttcttcaataggagtatctaacataaatgtaccaccataaattgctgataatcttgcaaaaccttgaggtaattcacctaaaccatataatggataaatataaggagatttaccatatcttgcaacagatgtaacatataacataattctatcataagtatctcttgcaggttcatttaagtaatcatcatttggatgtaatgccattgcatgacctatgaaatcttttgtacctctctctaaaccatatttataataaatttcatccattgtattcttatctaaatcaattccatgatgtgtctttgaatctttttcatcataatttgcaataaattcaagaaaatttttcattcttctcttttcaaaaaatcccattaatggagaagagatagcttccatttgagttgatggaactttagcaattttaccacctctataaacaaatgagccagaaatttgtttaaattccatatatctagtaacatcagtatgaactaaaatattagttaattcaccatttgacattaaaaatttaggaattaaatcaacacaccaatctctatctttaccaaattgatcttcatattgtttctttggtttgaatttttcatataattgagttaaatttaatgaagcactctcaccaccataatagttttgacgatcaatgtgtaacacttttttaccttcaattgagaggataccggataaaatacactcggttaatccagttcctaaaactataacatcataattctcatccattgtactaatagaagttgtttaataagagataacgggtataaacgaaagaaaagaaacaacgcccttactgttaatgggtgtagcatgattgtaaaattaaacagagtataaaattaaaaatagtttagttttggttatatcgcggtttattatagtacagaacttcgacggactattaatgtagaggtttactatttacaaatttataaagtaatatttttaggatctaacgataagtgcttgaatactctagtaccaccaccaccaagataatccccaacaacttgaccagaacctctcatttgatagtaataacaaaccaaaccttcaagtccaacaggacctctagaatgaattttatttgttgaaataccaacttctgtaccaaaaccgtatctaaaaccatcagcaaatctagttgaacagttccaataaacacctgatgaatcaatcccctttaaaaatctatctgcagtatctttattttctgttatgatagcatcagtatgtttagaagaatgtgaattaatatgaataattgcatcattaacatcatgcacttgtttaaccgcaagttctaatgataaaaattctttagaaaaatcatcatcagttgcttcaactattaattcttggtatttttcctttatttgagaatctaatgtagaaaggaaacttggttcaatatgtaattttatcttttcgtttaataatgatgttagtattgttgattttacttcattatcaagattttcatcgataagtatagtttcaactgcattacaaccagcaggataattggtctttgcatctatcacaattttaattgccttttcaatatctaaatctttatctaaataaatggaacaaataccatcagcatgaccaagaactggaattttagtattttcttttatatttttaactaattcatttgaacctcttggaatgactaaatcaatatatttatcttgactcaataaatcagaaacttcacctcttgttgaaattaattgtatactattatttggaactttagttttatttaataatatatcattaataacatcagaaatttctttaaaagtatttaaactttctttaccaccttttaaaatagcagcattacctgatttgattgctaaagcagtgatattagcgataacttcaggtctactttcaaaaatgattaataaaactccaacaggacatgttaatctatataaatttaaaccatcatctaattgagttgctaaagttattttattgagtggatcatctaaattagcgacatcaataataccatcaagcattgaatcaaatttaccattaattgagagatccaatcttttaattaatgaagatgataaattattatcaattgctgtttgcatatcaattttatttgcagataaaattttatcctttgcttgtaatagaccatctctgatcatatgtaaagcatgagaacgttcatcatttgataaagttttaagaaccgtagatgctaaatgtgcattccttgcaatttcttcagccattatgatttatttgatgatatggtattataatactaccctaaatggttccaatttaatgcagtgcaaatttcagagtcgatattaaatcaaactgtgatgtgactcactgaaaaactgactaagttttcataaaaaaaaaaataataaattacataagcgccacattcgcggtttcccatttaggccactttcccaaagcggtattaattgcatatatgggccagatttacataatttttcgttttttgctgctaatctcatttcggactattttatgcttatctgaaatttattttcgggattgactggaaaattttaccttttcaattgatgattataaattacactcaatttcccatttcattcaattaaattttgccttcacattttcttttttactttcatctctttcttctctttcttctgatacttacatactatttttttatattctaattcctttatcagaagaataatcgctcgctcaattactctaagtactgttaaattaaattaaaaatgcaattctcaactgttttcatctcattagctgcaatctctgctgttcaagcagcttcaaatgattctatcaactccacttctgtttcaactgcaggtgctccagcaactgctcttggttcagttgctttaggtgctgctgctgctgctgcttttgcgttattataagctaaattataacacatttactataatatacaaaaaatactattttttattacaactttattcttttactgattaattaattaatttcaagtatattatattttttttattctctcgattatttacatataatataactaaatatctctgttcacttagcctcttattgtataatttatcttttataactataattaattcaaaaaaaaaagctgcggcaaatataaaatattttttctatcttatcgatgtcacactataataatgtgggcttatcaaaaaagtataatttttataaaatcacggaacaataaaatttttttcgataagttttttacaaactatattggttatatgaaacatagcaaagcatagatctgtacataaaatgtatgtttgatattatattagcatagtaacaccatcaacgacacctcccataaatcatcttctgtgaaatccaggaagattttccgctgttcccgattaacttttcacttagaggcgatggccagacctttttttaagcagggctagaccgcctagactcgaattttctagaaaaattaatttttttacttttttcggattatttggtattacgtaacagtgtacattacgtaatatacattatacagtttacacacacttacaattcatcctttgggataccattaacaccaactaattcagtttcaaagattaatgtagcatcaggtggaataacaccaccagcacctcttttaccataagctaattctgatggaataatgagtttacgtttttcaccaacacacatttctaataaaccttcatcccaacctttaataacttgtccaactccaagtttaaatttaataggttggtgtctacctaatgatgaatcaaaaactgtaccatcctctaatgaacctgtataatgaactgaaatcatatcaccaatttgtgtacgatatttacaattttcaatttctttattaacaattatttgtaaatgatcttgtttatcgtctgttacatcaacaatatcaattgcattggtaattgcattaaatgcaataaaactacttaagattgaactaagtttcattatatttaaagaaggagactaattgaaatggacacgtagaatcaataatttgtaatctgttacttaatactcatacaatttttgtataacgcgagattttaaaatcctgttaaatctcaaggttacttgatttcataatgtaatttcttcaaagttatataactttctcttaacctatacaaaatgaacacagctgatagtctatcaaatgatgcaattcttggtttagatattgattctaatattaatacaaattatccaggtattgatatcatttcaaataataataataattcatcaaacactttacagacgcgtaaacgtaaaggtgatagattaacatcaattgaattattaagtggtagaggtataccaaaattacaagaagagtttaaaaaattcaaatttatatcaaaaagagataatcataataagaataaacataaattattaagatcaaataatgttaattatggagaatctcatcattatgagaatttatcaagaattttacaagtgtatcaaagttggggtcatcaattaacacctcatttgaaatttgatagatttattgataatttatcaagaagtattgaagatactgatacaaaacattggttaagggatcaaattcgtgaagaaatgagattaaaaatggagaaagagaataatattgatcaagctccaacaaatacatcaaatatatcaaatacattattacccgtatccaatgccccaatagagaattttcaaaaagaggaagataattggccagaattatttggaggggaaccaaatattactacaaatggtatacccactcaaaacaacactaataccaataccaatatcaataataatactagtgccaatgtcactgctaacgccgatgttgatgtcgatattgatataacacaatataagcaaacctcattattttctgttgttcaacatacatcatcacaacaattaccatctgaagatataccagaagatgtgctgaacgaagataatgaaaatgatgcatatgatgcattgaatgatgtagatgatggattacaagatattctaagtgatgatgaatataagggtaataataatgataaagttgatgaatcacaagttatgtttagtcaatatttagcttcagattctcaattacaatcacaaccacaatcacaaatacaggaagaatctcaaaatatatcaactacggttgaacaaaatacatccccagtaccaccatcatcaccacaaccaccttcagatgatgagttctcagatgatgatgctgtatttgcagcaatttaatagtaataactgtatatctagtatccattagactgccgtgtacattatgtaaagatgtaaaatttataattttttttatgtaatataatggaggctcaactttttaataaaaaatagctgtattacttttacttaattattttcatacaaagtttctcttttcaaactcaccaacaacaactacttgttctctttatatttgactttatttgttacattatcagcaagtattgcatatccatataacacaaagagtgtatatataatcaaggcagatgtggtttactagtattctacattatacatgctatattctatgccttgtcccatgatatctggttaaaacatgttcaaaatccacattttggcaataattgccatcaattgaagtttattagttcactaatcgataataattcaaataaaagttaaggagatacttgcaaaacattgcgtcgatgaggctataattttttttactatgcatactaaacttttctcgaattccttgaaatgaatttttaaaacatgaaaacaagagagcttcttaatataatgcctgggtagaggttatagattttagagatcttgggaaatttacaattcaataaaaatctatttcaattattactttttttaaaatatatcaaatggtagcaacacgtagaggatcacctgctgtttcaaccacaagatttacacgcagaactcgttttacctctgcaattggtgcagatgaagatgaaaatgatgatgaattcacaaatgaaaatgaaaatgaattagatgatgcggaaaataatgatgaaccatctgaagagtatgaagaagatattcatgatcgtgatgttaaatcaggaaatggtaaaagtaataatgacgaacataccgaacatcaagaagatcacggcgaagatgaagacggagatgcagatatcagaccccatagaacgcgtagacataaaaatattaattataatgaagatagttacttaaaagctttagatgaagaagttaaggaagaagaggaggaagctaaagcatcacgcctttcatcttctactaataattataaaaatgatggagatgatgaagatgattatggtgatcaatatgtacatagcaataccaatggaagaagaagtttgagacgtaagagatcacataaacatgaagacgatgatgattatgattttaatggtgatgcaattgatacaaaaattgatgatgatgaatttgtggcatcagatggagatgatgatgattttatcggtaaaagaaataaaagaagacaaagacaaagacaaaataatttcattgttaatgatgattatgaagttgatgaaaatgagtcagagtatgaaaactctagaaaatcaagaagatccaccagaaattctagaacaagaagtcaccaatataatatgagaagtactagatctcgtaattcaagatggaatgaattattaaaagaaaatgaaaatccagatagccccgtcacattagaagatgaattgaaagatcttcaaaatgattcaccactgaattccccaaagagaaatttaagaaatcgtaaagatgttaactacaaattacctcctccttatttatccgaggctcaattagaagaattggaaaataacacacagacagaatcaagtccgagaaaaggtcgttctggtagatatggtggttctactagtaatgtttccagcattcgcagattatattcaactgttggtccttttggtggaagtgacgttcattcattatttcaatcaaattccattccaagtggtttagctgtattggcaaacgcagaatcaagcgattcagatgatgaaaacgatcttatcaaaccaacagatccaaatgatactaatatcatcacaactgcaataaatcctaattcaactaataaaaagaaaaattctttggcagataccgatcctttaggtatagacacaaatattgatttctcggtagttggaggtctaaataattacatcaatcagttaaaagaaatggttacattaccattattataccctgaagtatattccaaattccatataacaccaccaagaggtgttttatttcacggtcctccaggtacaggtaaaacattaatggcaagagcattgtcagcatcttgttcatcacaaaataaaaaaattacatttttcatgcgtaaaggtgctgattgtttatctaaatgggttggtgaagctgaacgtcacttgagacttttatttgaagaggcaaaacaacatcaaccttcaattatattttttgatgaaattgatggtttagcacctgttagatcttctaaacaagaacaaattcatgcatcaattgtttcaacattattagcattaatggatggtatggataatagaggtcaagttattataattggtgcaactaatagacctgattcaattgatcctgcattacgtcgtcccggtagatttgatagagaattttatttcccattacctgacttaaatgcacgtaaagaaattttaaatattcatatgagaaaatgggaagataaattaaatgacgaatttataactgagttagctaaactaactaaaggttatggtggtgctgatctacgtgcattatgtacagaatctgccttaaatagtatccaaagaacttatccacaaatatatcaaagtaatgaaaagttgaaaataaacctatcgaaaattaagccaattgccagtgattttaccaaagctttacaaaaaattataccaagtagtgcaagatcagttaataatatatttgaaccacttccagattctgtcaaaccattattacataaccaatttcttgaaataatggataaattaactagtttattacccaatgagaaagaacttacactattagaggagtctaaatatgaaacattgaataataattttcaatctcaacagattattaagaattttgattcaatgagaatatataaaccaagatttggtatttttggatctaaaactcaaggcttaacatatctaagcaattcagttttgaataaattagaaggttttacagttcaaatattagatttaggtaagatatttagtgattcgagtataagtgttgaaaatgtatgtattcagttattttcagagttgaaaagacataaaccatgtattttattcattcccgatactttcgggtttttatcaacaattaatgaatcattaaaatctacaattagatatttgattagaaatattaataacaatgataaagtattgatttattgtgaatttgaatctaataaaacagaacaattacaagactatttggacgaaattgaagaagtttttggaattactgaagataatatcataatggtcaatgatccaaatctacaagagagggatgaatttttccaaaatttttggaaatcaatttattttacaccaaatgaatataatgatatacaaattagacctaaacgtaaagaaatcacattagaagttgttaaagatacgaatgagaatgatgaattgaaggataaattgaatagagataaaatagctaaaaccgaaagagaactcgctaagaacgatatgagattaaagaacagtttgaaagttaaattatcaggtctattagatatttttaaagtacgttacaaaagattcaaaaaacctattattgatgattccttattaatacatttgtttgaaacagatggtacaaatgtggaaagtaattatcaaatcaaggatgaccaaattttagaaatttcaacaaataaattatattataatatggatttagatgttattgaagaaagattatggaatggatactatagtgaaccaaaacaatttttacatgatttaagtttaatattgaaagatgctaatttgtcaaatgaaaaggatagaatcttaaaagctaatgaaatgtatgcacatgcagttgttggtgttgaagaaattgaagttcaatttccactattagctaaagaatggaaagaagtcagtaaaagagaaaaacaaagaaaaattgaatatttagaaaaaagtagggaactaaaagctttagaagatgtaaatgctactaacatgacaactacaccacctgtagctgaacttgaaggtaatcaagtcaatggagatgttattaatggagatgaaaagataattgaagaagataccactgatgttccagcagaggaaactgataatgttgaacaagttcaagcacaatcacaaattcaacctggccaagaatctaatttgaatggtgatattaaagatgttaatggaattagggttgaaccagttgtattgaatgaaccagaagtggaattacaagttgaaaatttgaaagaaaataacgaaatcaatgctgatgttgcaaatgtcgaaaaggaacaggaagaagaatttgttattgaacctcaatataatatagttaatgttgagaaagtcaaagagttggagaatttattacttaagaaaactgaaggtttccatgttagtaaattagaaagaatcaatagcaaattatgcaatattgtatggaaccatcgtttatcccttgataaaggtgaattgatatcagaattagagaaattcatattggacagtctttgaatgttttgtactgtatgtattactaagttatataagtttaatatggttacaataaaactcgttatagtgtagaatcgatcttgatctaaatttcgagacaagctcgataatttttttcaaaaaataattttacccttaaaattgttctttatcaatcgactgcccaatgtctaaatataaggagattaaagaaaaggaacaattacagttacaattacaagctagattcacacaacttgatcaaactgttttatcatggttaactccaactgatgaatcaacagaaacttcatcaaaaaagcaagatagttcaatatcaactgaattcggtaatttacaagtagtgcccggaggtgcaggaattgatttagaagataccaaagaaggtgaatcatctaatagttccctaccaagagtaacgattaatgatttccttgaaggtacaaacactaagaaaagatctaaaaaggaagataacttgagtagaatcaagaaacctaacaataccactactaatggaacatcagcgtcggcgtctctaagagcattaagtaacaaattacgtaatgaccgtcgaaataaaactgaacagaaagcaccgccacaatcacaacaacaaaaaggcaaataccagccgcaaaatgataaaaataaatcaaaattcgggaataccgagatttccgatgataattccgaagattccgataatgaaatttttgagagaagagccaagaagaagcttagtggtaaaagaccgttttaacaatcaaaccttatagattatgtccttaattagttattcaattgacatgaatcccttatctttagcagaatttttttcacttcatgtagggctgatttattataaatgaaatatattctaatctatggtacataattataaatttttatagaaaattgtttaaacacaaattaggaaaacaaaataaattaaaacaaaataagaagtaaaaaagaacctttaaccttaacccaaaaatgcaaacaaaactgtaaattattattaaatttgatctcatgttaataaacttgatattttgatacttttctctggtttattaacattatcctcaagtatatcacctttactacatcttttagtctttggactattaatttcagtaaatgtagctactgaactagtacttgatttagtactattttttccattcgattcttccgataatttattatcttccttactttcaaatttttcattctctttcccatcttcagttttattcatctttataagttccttttcttcactaacagcagttttcaatgatgagcttaatggtatatttagtggaatacttgaaattccaggtatcgttgcaatcgatggtaatctaccattgccgttaccatttacatcattttcattttcattttcattaatagttattatactacttaaattatttgagattgatgatgtacttggtctcataaaactacttgtcgatgcaattgatgaaatggaatttgatgccattgaaaatatcgaattattagctgatattgaattatttgttgatggttgatgtaaatcaaatattgatggtctaaattgtccaacaattgatgaattcattgaagaatttcttgatgataaatgaaatctattactatttgatatattagatgaaatactatcaagatgcgatcttttcgccgtacttattgatgaatgacttgaaattgatgatagtgatggtaatttattattaattggagtttgtgattgttgttgttgtaatggtaaaattggtggtgttttaacacgttctggtgtaattgttgaattaggtgctgagctacatggatcaataaaaactgatggatatctttgtctagattcttgaaaaaatacatttgatttagaagagacaggtgataatctattaatcggagaaaatgatcttgacggtggaacattaaatgctttataaggtgatttttcttgattaaatggatttcttaatgatttaggagttggagctctgaaaactttattatcttcaactttaggttcaataactggttcactttctgttttcttttcaagtatatcttcttctctgtcgtgtttcttcttcttttcttgtttttcttctacttctccatctccttcatcatcatcatcttcttcttcttcttcttcttcttcttcttcttctttatcaaattcattacttctacttctttttctattaggaaatactggtttgatatcagtgacataaacaggattatatgaaacaggtttattatttttattgggtaagttgtattcaatcgcattatttataccattgttttctataccacttgaagtaaccgaatttgataaatcatcatgaatttcattattattattattattgttaatattattatcattaatattgttattattattattgatattattgttattgttaatattattattattattatgaacatcacctgaacttcttctagagtttgcccttcttcgtatcatatataaagtttcttgacaatcttttctaaatttatcagttgcatgtctaaattcccaaattgaatgatttggttcatctaagtgtttattatcactattgttattactattgttactattattattttcgcaaactttatgaaatccatacatatggagttgacgaacaaaagaggcaacattaccatgtttgaaatattttgttaagcaagttgcaaattcagtacctggtaataaagcaaatgtaacatcatcattttgatataatctactccaccaaataagatgtgataatgatggatcatgaagcattgaaaataatttcattacaaatgctgaaacttttttacttttcgatttactatttgagtttgatgatttcctacttgatctttcattattcattgaagatatttgttgggtatttgcattaatattattattcatgatatcattattattaatagtagtagtactattggggttaagattattattatattgaatatacggattatgatgttgactttgatttggatcttgttgaaatggaggaagttgctgttgatattgttgaatttgttgcacttgttgatattgttgtaattgatgttgattttgtaacatttcattagtatattgaccattagaattaatgttatgcatatttctaatatcattaggtggtaattgttgtggaggttgatgatgatgatgatgatgaggttgctgtggaatttgctgctgctgttgttggtgatggtgatattgttgcatttgaatttgatacctttgcatttgttgcatttgataatgataatcatttggtatttgatgatcataaaatccattaggacctgtaacggcagcagctgataatatttgaggtataccttgagaattcattattggaccttgttgtatataaccttgattagcgatatataattgttgttgaaccttttggtcaatgttattcagattattgagattactactggactgtgaggtattagaagctgcagataaaggcggttgttgttgttgttgttgttgttgctgcagtggcggaggcggtggcggttggtatgatgatgggatattagtaccgttattaaacccatttagagtaattatattatcaatggggatactattaccagaaggatgattgttattcatattgatagtaaactagaatagtataatcagggattgattaagatatattgtatatagcacagtgtacagtatattaaatagggataaaatatagatttaatatggataaaatatgggtaaaattaatgattaaaattaaaatagcaaacggtacaactgtaatcaaatctaggaaaggcccaacaataagaagaacaaaggcagaggcaaagaaaacagaaaagtgagaaaacaagcaaatttcaagagaagtcactttattgacaagaaaaaaatggaaacttcactcgtttctttttttttccttggattgcttcttttcaaatctattttctccgttttattgtttatttttactatatttactatatgtttacttattttgttatgttattaatattggattgttattatttattatttattatttattatttatcatttaaattatatacgtatttagtactaaaaatatctgtaatatgcactaaaatttttcttcacgaactagtaatcttccacttaacatatcattcactgcagataatttatcccaatgaacactaatacccctacgacgtgcaacatcagtatctgccttccaaacttcatcaatatccttaaaataaactttagatccttgcattgcacataaaactgcattattattaacatctgaaacttgaatcttcttaccatgtttatagaaatattttaaattcttttcagcttcatagaaaccttcaacttcaccttcacgttcacatcctttatttaatctttgtatcttttccatcatttggaaattattctcttcaataaattcacatgccttaattgcaaatctagcactatacattctatccatactacttggtatcttaccttgttgaacatgtcctggaattgctgtacgactctcaaacttaccttgtgcattctcttcaataatatcagcaattaattctgttgtataaactttacttgccttctcatttctaatgaaaatcttaccagatctttgatcacctttatcatttgcaaaagttttctctaataattctaaatcttcttcaatactatttaatgaaattttattctctggggtataaactgctaatgcacctgtaacaagtccacaatatgatgcaatataaccacaattaccaccttgaacttcaataacaaaaactctacgtcttgatgatgatgcactttgtttaactgcatcacaataattaactaaaatatttaaacatgtatctgatcctaatgaatattctgtacctggaacattatttgaaactgtacttggtaaacaaacaattggtatattaaaaattggatatttttctcttgcatcctttaattcctttaatgattcatatgcttcaaatcctccaataataattaaaccatcaagttttttattttgtaaatgaaatgaaacggatccaaaatcctctgatggtaatgaacgattagtacctaaaactgatccacctaaattatgccattcttcaacatcattccaacttaattctttaattgatccatgtctaattaatccactaaaaccattttcaataccatatgctttatgatttttagataataaatataaaacaattgctctagttgcacaatttaatgatgcagttggtgcaccaacatgaataataccaatattcaaacgtttttcttctggtaaaaatttactattatcatcatctcttgaaattgaaacaaaattatcataatattctttaaatgttgaatcacgatatttaatggcttcttcgaatttcttttccttaatacattgagcaatatatttagttttagaaactgcatcaactaatggaactctaacaattctattattttggatagcaatcattggtgatggtgttgttggtgtattctctaaaactgcattaattgcttcaacaccttgtaatgttgataaacatctatcaattgcaactgctgtaccacctctttgaacatgccctaatgtagtaattcttgtatctaaaccaatttcaactaaacaatctttaacttcttcagatgtgattttatttaattcattatcaattgcaccttctgcaacaataactgttgtctttcttctacccttttctttatgtcttttacaaatttctttcaactcatccttccatgttaaactatttggcggaatttctggtaagaaggaataatctgcaccacaacaaatacctgccattaatgctaaccaaccacaatttctacccataacttcaacaacgaaagctcttgaatgtgatgcagcagttgaatcaatataatcaaccatttcacaaattctttccaatgatgaaaatgctccaatagttgtatcagttaatgacatatcattatcaattgatccaactaaaccaacaattgttaagtttctataattttcacatgcttcctttgttaaaatatttttttcaattaattcttcaactaatgatggccattcacttctaaataaatctgcacctgttaatgaaccatcaccaccacatacaactaatgcatcaataccttttaaaatcatattctttgcggctaataatctaccttcacgttccttaaattccatacatcttgcagtaccaattaatgtaccaccaagtgataaccaacctctaacatcaccccattctaatttttttaataaatcaccacctttaactaaacctgaataaccttcataacaaccgaaaacttcacaattaagataaatacctgctctaacaacactacgaacaactgcacacataccttgagcgtcaccacctgatgttaaaactgcaattcttttcttctttgttgttgctgttgatgcagatgaaatattcaatccttgctttgctaactttagtgcttcaactttatcaacactaataaaataatcatctcttgaattaattgtaatgatttcatcttgaatatagacatgattagtaaaaccaattaaatttccaacaggatcttcaatgaaaaatgagacaattttagattcttgaggtgatggttttataagtttgatattattcttttcagcaattgacttaacaatatctagtgaataagttaacataacaaatttaccaggtaattctaaatttttgttaacatcatgagatactaatctaattttcaatacaatacttttatttaatttaccctttgcatcaattaactccggatgtaaatattcaattgtttcttggaaaggaatgatatttgatttacctctagcattaccatcagtagttctactaattggaaaaacttccatccaacattctttacgagaatctgttgaaataccaaaattatcagcttcagttatatcctcccttgaaaatgtttgaatgattgtaaatccaaatttcttgtaaaattcaattaatgcaatataatctgcacttttcgtaactgtaaaggatgcatatgtaacatccccaactaaatctttattctttttaatagactcgattgcgcccattctgtatgatgattaattaactcaaagagtaaaagagacatagattaaagtaaattaagtaaattaatcaattttattttttattacatcacttaatggcagtgttcgcgattcttataaaaaatagttcaccaaaaacaatgcacagtgggatcacgatattccgggtggttttcttccagtgagctgttcattatgatgcgttaactcgtcagatttttagactctctgaatagaaaagatatcatcattttgaatcaaatctatgaagttttttttataataactataaagggaataaaagtaacgttaagaagtttatgaaagggtaaattatagtgaaatagtttgtgacgttgttcagacaatgaacttagtccttaccgaataagaactgataaatttgttcaaaccatctattaactccatttttctttttataaactaatctttgcttttcaagcattctttcatgaacttcaatttcttcaagacctgtaactaaatcaactgttaatggatctgatttatatttagttctcttaattaatttccaaacaatgaaaatgaaaatatcaacaaaacacatcatataagaaaatagaaatgtatctctatcccaattacctggtaagaaaactgtataaccttgtaaccaaaccattataaatacaacaacaagtgtgattatacaagcccaaggttgaaaccatgatttgaaagtgaattttgatctatcaattccttgctttaaaacggctcttctaaaatgtaaataagtgaataaaataacacaataattaattaattgagaagcagtaattaaattaataatccaatttaaaacagtatttgcattttcattcaattgtaaaaatccaagacaaccccaacataatgataacaaaactgcaaaaattggaacaccttgtttattacaataactgaaaacttttggagctctaccttgaattgataaaccatagagtgttcttgaagaacaaaaagtatatgagttacctgcactaaaacatgaagttaataacattgcatttaaaatatgaggtaaaacttttatacccatattatacattgcaattgtataaggggatgaacctgcacctggcctaccatcagcaattgcatttaataataatggatctcttgcgttacataaaataccaacacataaagcaccaccaataaagaaagttgttaatctaaagaaaacacctttaaaagcatttggtaaaactttacgtggattaatacattcaccagctgccatacttaaatattcaggacctgcaatcatataagaggcattaataagacaagctaagaaaccttgaaatttacctaatgagcctaaatgataatattctaacataacaggagtacttttccaatttgtaaaaccaaaagcatgatgttcaggattaccaccaaccattgtaataaaagtgaaaaacatcaaaccaattgccaataaaactttaccaatacataaccaaaattctgcttcaccataaaatctaacagcagcaacattaataaaaaaataagcaactaattcacaagctaaaggtatagcggcagaataaccatcagtccaaaaatgaatcaaagtattaaataaagttaattcgaatggaattaaagcacattctaaaacccaaaaattccaacttgccataactccaaaagcttcatcaacaaatctttcagcaaatatacaaaatggagcacctttaataggtaaataacaaaccatttcagcacaacaacatgtaatttccaaaattggtaaacaccatattgagaatcctaataataatgataaacaaccaccagttttcaaagctgtaccaatattaacgaaaagagagacaccaattgtaccaccaattgcaattaattcaatttgtctacgttttaattttctatgagtatgaccttgttcatattgtaaatattttattgtaacagaatttaaatcagtatttttagttgaaatatctgaatcttcacttaaatataacggctcagcagttgttttctccaaatcaatatcaagattttgaccatctttattatttttattactaaactctaaatcttcattagtaaaatcctcattatcaaaacaatcagcatattctaatataccagcacttgaagcggtgataatgtgatcatcaccatttgtggttttcttttcatgtccaaaagtttcagcttgaacatttaaacaatattcatcagcggcttgatcatgcacaatatgtgggattggcacgaaagtttcctttaaaagttttaacactgggttcattgtgatataagagataatagatcaaaaaggaaagaaaggagaaggaaataatacaataattactgaaaagtggcaaatggggggccattttaagtaaaaaatggtatttcagaacataattaattaatcaatcaatcaaaagtttaaaaaccctatataaagtataaactgttataaatcatgcaaaaaaatcaaagctgagccatcaatccaataattaaaatttttaattaaatagttgcggggcaatacaatacaatacccttcggctcatcggaactttatcagtgacgaaatcttgaaaggaagccgagtttcctccgtccatgggttaatcccgctgttttcccattaactgattgatcatccgatgggacttctccctctaattgtaattctgttacggagtccgtggttatactattattatcttcagtagggaccctgttagttagaatttcaacacttggtacagttgctaaatttttatctagagatggaattgccggcagcggttgggattgagattgggcttgagattcagctgtatttgttgtaattactgatgttgaactcaatgatgattttgattgagattgagattgagatttagctttaacttcagatttaatatcagacttcatttctttaatttcatcatctttatgatcatattgttttaaaagtttaagtaattgtaatacatgtaatgatcttaacagtaatttattatcattgattaatgctcccatttcaacaaataattgcagtacaatctctgaaaaatttgtattaaatactgtatcatccgtcaacatctctctaaatgttggccattcacgttttttatgtttattatctttattatcactcttttctttacttttattaccttgacccatttgaaatttacttgtaaatattccattattagttacattctcttctttatcactttcatcacttgtataataccctaaatcatctaaaatacctgttgtaaatgcaatatcatcactattattactactatcactatcatattcttcagaaatagtacgattcagtggattaatatgatcattattagcattatcagttggtatctctaatggatcaatatcttcattaattgttgttttagttgtatttttgttattattattattactattattattattactattatgatgatttgattcaatatttgttaatttctcatttaatttaatttcattattctcctcaattattatatcactaccaattgtactaccggaatctcttctgctattattggctgcttcaactaataatttccaatccagtgcaacatcatcactacctgtagtatctaatatattataaattgcatcattaataccttcttcactattattctctaattttagtactaaatatgattttaatttagattcaataatacctaatacaacaaacattaattctaatatcatatcatataataatggtatactcaattgtttactacaaattaatgtgccaactcctgttgggaataatttccaatttgctccaatttgtccactatacatatattcaacaattgccctaactgttgtcttggaatatggtaaatataatactctcggtaatcttaatgaattaaatttattgctattattgttattattaatgttcttcattccttcatttgaatcattccctccttcattatcataaatataatcatattcatcccctctttctccattggcatatcttcttttcaacatatcaataacatcctcattaagtaattcatcaatactctttccacgtttttgttcattgttattgctattatcattattagacatttcttcctccttcatttcttcaccattaggtaatactttgggcattggtaattgatcaggtatttcattcgaattcaaacatttcagtaatgcttcaggtagattaatttcatcacttactacaccttcaccattcttattaacttcattttttccacttacatttgatgttgaaaataatgttgaataatcaccagatgttctctcttttgacatttgatattcattattgatcattttagataaattagaagatatggaattatatgaattagtagatgaagaagtgtatgatgttcttgacaatgttgatcctctacgtgctggtaaagaatttgtcataggcatacctgttgatcctctacgtgatggtgaaacattagaatttcttcttgatatagggaaatatgaaatagaattatgacgtgaattagtgttatgatttaaactatatgaattattacgagtttttgataatgatattgaaactctgtttaatgttgcattaggaaacagtgtattaccacttattgaattatttctggaattatttctggaattatttctggaattatttctggaattaacagttgagttactccttgaaattctgtctggtgatagatcatctctgtatctttctttaaatggacttctaaaagatggtgtactattattattactcgttaaattattattactattattagtatttctactatttcgaataatttcatctgtactacttgctgttttcttgaatgattgagaatgaaaaattgttggtatccctgatttatgaatcatattttgtcttgaattatatgaggaatattcatcatttgattcatttgatccatatgtgctacctcttgaagataaatcaaatgatctacattcgatatatgattttgcatatgcatctgcaaataattcatcaaatccaacaccccaccttcgacgacataatgtcaatggaactgaaattattgtaccatcactacaaacaatatcaaaatctgaaaatgatgtatttctttcaaatgcattcttaccaattgcaattgcatatgatggtaatacacttctaattgaattaatttgcatttgttgtgcgacacgatgtgaatatgctgcgaatcctcccatttgatcattaatattaatattgtttattgaacttgtcatgaaatttttattgaatattgaatttgatgtagctgatgtgattgaatctgatcttttccttgtctcgttactatgagttgatgaaatatcattcattctctgtgatgaatgaatactacttgttcctggtgatattaatcttgctttattaggatttgcatttactactggtgatttactaaaaaaattggtgaatggtaatgaaagtataactaagttgtcaaagaaattaacacttcccctacttttattcatatccattgatcctagaaatgcaattttatgatgcgattcccaaacaaatccttttgataatctatgactgtatattttatgcatacatgatatttgaagttttgtccatgcattggttttaatattaaaaatgaaagaggatatctttttttcagttcctagaaatcctgtcacaataatattatcaccaaatgtacctaatgttgggtattccatagtagatagatttgttatatcataatcacaatgatgtggtaatctgataccattagaactttcgttgaatatgattaatggttcatacttgttgacatctggggatctttcaaacagaacaattttagtttggttggaagatgagcatgttgtactatatacatcattcaatgattttcttatctttaatgggtgtcttttaggtaattttggagtctgagaacttttctgattattgttgttttcggtatgtgtttccctttcattttcatcatcttcaaaaattaaactaaaatctcgatattcaataaaatcagtactaatcataactcccttttcattattaacagcactcatactctcaacagattgtacatagtcattattttcatccaatccaccgatgattatcatacctggatgaattaaatttttatcaaacatttctaaattaggcaatattgaaacaacttgatcaaatctacgtataattttctcatttccttcggggtataagcaagtccatttcctttcaattatatcaaatttccaaacatcattcaatactttaagtttattgttttcatcaaaggccaatccacatccaacatatacataattatcataaataaccattccatgaaacattctaggacgtggctttgagagtttctcatcgttggttttattttgcctataatgtgtccatttcctattaatcaaacttaacctgaaacattcggatgaaagataatcgttgaaatcaacatttccagagtttatatcaacaccatcacaagttaatctttgttcaaacaatttttgtagtgaatttgtagtaaaatcggttggtacatcaatatctaatgtacatccaccaaatacaaaaactcttgaatttgaaatatcaattgatgctcctactcgggagtctaattttagtctagagtcagtgctctcaacatttggcatatccaaaggatagcatttgtttgatgagagatccagtgctcccattgccctatttaatgcacaatgtagtcaatatcgaatgaaaaaaaaagatatatggcaactgctaataactgttaatttatcattgattagctttcctggcagtttcatgcaataattcgggaactttgttaggttgaaaaaaagcctgaaatttccgaaagtgctgaatgttttccaaatttccgaaacaaaaacaaagaaattgcactttcataaaatgagaacatgaattggcgagcattatcacaaagatttaaaagtggtgataatcccatatattatatattgatatatagagtagattctacaggtaccagactggtagacaacataatatgcttccgttgtacttacttaatgccgtgaaaggtgaacctgttattgttgaattaaaatcaggtggacttgttaacggtatcttagaaaactgtgattactacatgaatgtcactttaacatctgcatgtgcatccctccaagaagacagcgagttccacgaggtcgatcatatctatatcaaaggtactcatattaaattgtttaagatgggtaatgaattcattgagaaattcaagttacaccaacaaaaggaaaaagatggcagtcgtcatggtaataacagacaaaataattacaatcacaacaacaatcataataacagacctaacagtagacaatacaataataactataataataataacaataataaccaaagacgtaataatagaaataataacaatagcagaaatggaaatggaaatggaacaggagctggaaatagagaagaattaagattttaaagtgtccatctatttcattacaatgtatattaactgttagctatataaatttgtgtttttttcacccctattatatcttttaataaactaaaaaaaagtaaaaaattaaattaaattaaatggaagtcagagaaagggtgcccatcccataaaaatgactgaaagattgttttcatctgtagcatcacgaattaattcacgaacaactgcttcatcacttaaacctttagcttcaagcttgtttttaacagtctcaatagcagtattagcttcaatctcgatatcatgagttagttcattcgaattttttttatttgtattagcaacattgttattacctgtcacatcacccatctcaccttccgtgaaataaatcaactttaacttcttctttcttaatggtgataaagtccaactatataatggatcgtattttaaaacattcaaaataccactaatatatagcttatttaatcgtaacactcttaaaacatgttcacaactcttactgaatataccatttacaccagtgatacccataccatcaaccaaatctcttgttaatctaaatggaacagtttctggaattggtaaggttttaccttgatcaaaagcaacaccaaaatcaatatgaataggttctccggaagatttatctaaaaggatgttgttacaatgtctgtcaccaatacctaaaacgtaaccagtaattgaagtggtggcaataccattagaatataaaactcttgaatcaaaccataaatctggtgatgtgaaattattatagaaaaatcctcttaaatttggtaacaccttcttacaaatatctttgtatacttgataacgaactgctttcgattgagtttgaacttctttcattttgagtctagcttcatttatatccaactcgtcattaacatgcattgactttagaatatcaattaatggcactgagttaggtacaaattccaatacccctgatgttggtccaagtggtaacacattataaacacgaattctcaaatttcttttacgggtttctatatctttccatagtattttattgactttttcaaaaacttgtttcatgattgaatcttgtcttaaatcatctggtgctttcagtaacatcttttggttctcaccattcgataaaagtagtttcataatctttggatgacttactccggatgcagcaattgttatttgttcattaatatttcttattataggtaattcactttctttgtaggaaccggtttttttcaccagaatacttttgacaggtgatggtaagtttagcaaaggtagggagtccaaccaccactttccatttggcactttggatattgatatctttttcgtattttttagtttagatgcggcaacaacaactgcattgtcagcaaatgaattaacagattccaagatgcctgaaatgttttcaacattaaaattatgctctaagactttaagctgaacccaaattttttcagaaaccttacctctggatacagcagcggaatcatccgactcctttttggtcattattaatgactttaagaggtatagaatatggaatggatgtgaaagtgatatgttaataactagttttcggagaagaacctgaaagtttgtctcttcatcaagtagctttgatactaattggttacaccaaggaacaaaattgaacattggtaatccgagaagttcatcttccccaatattgatatcattatgctcaatccacaaagagcaaaatctgtcaatatcattttcacagaattcatgattcccaaactcaattgatttaaaatagaaatggacagccttttcaatgtaattattactttcaagtttagatgcttgtaattcttttatatgaactttatgtctaatttggagacgatttaaatcttgtaatgcatatctttttttttccttatcagcttcttcttttataaacttcttgatagatcttatatctttttcaatcattttaatattgctagaaactttatcaattgatgtgtccttagcatatctagaaatttggtcatcacaaaattttgccattatatggtatgtcaaccctaaatcttctgaaatatcaacttttgaaatattttcaaggctttcttcatttggaagaatataatttgacatgatcatagaagatgtttcctgtttacactcgtcgcaccattttgcaatggtagaaataatgagttctttactaattctggtaaaaccttcatttgtttctgaagttctttcgtctgacattgtttgtgtgttttccatttcaataatatttttcaaagtttcaataggaaatctggtatctgattgctgagtccaaaaggcatttgccaaattgaactttgctattttatgcacatgaatatttttgttgttatatctattttgagaaatctgatttaataaaactgaagaattaatagctttttgagtgactccattatcagtcataattttattataaatatggagttcgttaataattccaatgtagcacttagtgtcactcaaatcaaaatatttgatatgattgctgttcccacatttagttatcaactcaaaaactgaacgtctactcaacaagatattttcaaaatcagaaacagttgcatttctaaaccatatattagactgattgcatttcttcatgaattcttcaaatgttagattttcaagtgaagttatctcctccacagtattgcatatacttaaggtacgcaaccatgatttcatcgtgtcaatcttggaaaaataccctttaccaaatgtatttatatcaaaacttactaatttctcaattgcatcatgacatatatcttttgaatcttgtggacgttctttcacttgtctcaacacagaataaatacatttattttcagtcaacccattatcgactacagggatgtcccattgattcaatttccacatttgttcatacaatagatctgaatttgatgaagcttcattgacggtgtcctcattttgtgagtactcagtcaatatattagaaatacctgaccagcccatcgtcatcattccatcagcaatatctgtaatagcatcataaccattattgttgttcaataaaagtctagaatcaaaaatagcattgttgaacatcatttcaccacttttaatatttttatgcttcaaaatttccaatccgtaactcatctctggcacgataggtagaccaaacattaaatcactattttcaatgccagaataagttgcttttaaatagttgtagtaagctggctcgtgtaatagattttttacattaattatatctatagttgtgtagtaatcctcgtataacattaaagcactcttgtttctgttgatcaacaaggcagcctcgcaaatttgatcaatgtagaactgtttgtaaatgcttataaatttcacattacctgctttagctccaagtctgattaacaaaactaattcaacaaatatctcaatggcttttttaggaacttttttcatattttccttaaagaatctatcaatcataaaaacaataaaagtgccacgtctagttgtttgggtctcgatgtagtaaagaactaaaggacaaaaacatttaatagcaaaagatggagaatggcaaatataatttgcaagaagaacaataattgatgactgtgacgatagttcactgataatggaaaacattatttcagtaatccatgtctcaatcttgcatgtgcatatcttggtggaaaaaccgttcaatgctgtctctaatgtacctctgtagtaagtgacagtattgtcttctacttgatcaattgaaagagagcatacataattgcccatcggaaatataaactcttcaaacgaagcaaacaggcgatcataggaaataaatgaagagacactttctgcttgaatattaaatttgttcaaaataacaccaataattgagtcaacacaatatgtattcttaaggggtgcattaggaagttctgctagcaaaagtttaaaaatgatatccattgatttcacttcttcgttaaaatttaaaggaatactctctctcaataacgtattttcaaattcaaatgttggtgttttagggtagtttccagtattttcataataaacaccaaagcattttcctatccatatagaaaatgatttcgataaaatttttgagtactcaagcttaacactgtaaatattgtcaataaatttggatgaaagtttatttctatcaatcttaaatctgtgtgaatttactgctgagctgtaattaaataatgatgagatatattcaatcaaaacatgggtgtttggggtatcatcaaaagcattattcacaaaactcacaaaatctggtaaaggaaaaccgtctgcattttctattatttcaattccatacttaaaacattcatcatatgcacctagtttaactttacttttcaattctataacaagctttttcaactcaacaatattagtagatttatcatctccaaacaatgcacccaaaagtgaggcccagatgggtattgagataaccgaatgtatatttttattcctctcaagcattactcgtatgattaaagaaacttcatcttttatactttgactcttgagtaacggagccaaagaattagtaagtacttcacatatatgcgtatttttcattccattttgagcaattgtgagtagtaattttagttttcttaagcatattattttttcaactactaaaatagaagaagatatcaaaagcagtagtcttgatgttaggtgatatatcaactgtactgtccaaatttcttcaactttacacatattcgcaaaatgtaaaagcaaactaatacaggatttgggatcaatctgaatctcatattcatttaaaaatgacaagacttttgcatcggctgaaaataaattcagctcggtaatgtttaaaccctgtgaagagagagatttgattatttcactttctgaagaacagtcacaaaacctaaataactggaaagcaatcaaaatgaattgttctctcaatgtcattttcaatgtttttgcagatgaaaaaaagttctccaaagttttgaacaatttatttttaacaccaccatttgtccatgctaatgtgatcgatagtggtattgagtcacttacaatcgaatttggtttcatatcagtaatttttgaaattgtatcgataacttcaacatgattatatgccaatgacaaagctgtgatttccttgtacattttcagaatgaaatcttccaggtgtttgaagtcaaataacataaaaggaaacttttcaattggaaattcaaaactttcccagcactttaaaaaaatctctttatagttccaaaataaatgatatgcagattcaatattgttgagccttgtaatttgattaattgcatattgaagaaatgagaaaatattttcatactgtgaaagttccaacaagttgctaatggtggcaataataagagtttctgatgaaagtgaaattttagtcataaataaacaaaatgtcgcagatgattctgttgagaactgtggacgatgaaatgatttcacaaatttcgaataaatgtctagcttatcttcattatttttcaccaaatctgttatagattcaaacgtttgaaatttaaaaaaattattcattaaagagaaccagctctcaagatttgcaagtattttcgttttatcaaatgtagcacacttatcgtccacctggataagcagttgaatgcataacttaaaaaattccaacaatgatttttcagaatgtagcatatgcttttcattcaagttcatgacaaaatcgtaaactgctttaccatcagattcaattcctttttttgagctaatccacaccttagcaagaattctgaataatttcaaaatcaaaaataaagagcattcgtaggttttagtcatatgattttcaagtaaagtggtgatatcagtaaataataaatcgacaacatcttcattgagagaactgttagtacactcaatcatttttaagacttcatattggccagccaaaaacttttcttttgatctgattttcgatatgaacttaatagcggtctcaaatgataattgaatatccatggtcgcaaacgcttgtttcaatatataatgagttgctttttgttccaatgttgacctctcatagtaaagattgaatctgttgtatttaaaatagtctggaaaactattaaagctctgttgccttgtagttggtataaatgagtcaaaaaaatcatcttctctttctaaatgtgaatgaatttcttcggtgttcaaaacatgtaaagttatttccataaccttgttgatgtatacaatttgtgatatttttgtcagccaagtaaagttatcagcaggaatatgatcaatgatatcaaaatattcagctaagtacacattaaaactattagtagatatgaaattattgaatttttcttttatcaactcaagcaataaatcaatggaatgtgacaactgcagctcatcggagtctaatagtaagtatgaagcaatcgcccacttgacattatgaacattttccgatagtgattccaaaaatttgcaaaataacaatctaatttgtgttcttttatgttcattgtaggataagatatctagttcaataattttcatattatcatctatagcttttaaattattgacactagtacttttcagtacataactagataatgtggatacttctttcaactctatagaagtttttagtaattcacctttgtaaacatattgtgtaaacattgaattgattgaagatctttctaaatcgtcaattccagcaagccatgaaagaagtaaacaaatcatcattatatcactataattagagatcaaaggcaactgtgaaaatttactatgaaaccaatttgatactttagatgagtataattgatcatcaaacccattagatgctgcatgaaatttaatatttttgaatttgaaagatttatattgtttgagtgttgtaatccaaaacataactgattctttcgatatatttgcagggccatttatttctgaaaggtcaatcacattttcatattgctgtagaatcgctttatccaatataattgcttcttcattggaagtaaaatgatacatcgatatatgtgataaaaatatacatgatggctcacacataattggatcttttaacaactctaaattatatttcaatagtttattgaaagaggggctattgtgaaaacatggaatcttcttattatttatttctctaaaatgtttgctatagttgaatgaaatgctataaataacatttattagaaaaagaacccaatattttaatgttatatcttgtttttcaaatatagtcataagttttgatagtatatcattgatattagttaggagatattttatcaaattttgggagcacttcaattcagttgttgaagaaattgaaccaaaggttaacaatgcaatttgacaaattgttacatctgagactaattcgaaatgagctccatcaaacaaaatagaaattaatgcgtctattggattgctgtagtattgaagaatttcagaaagtggaaatgatgcaccgaattgaaccgatgataaatgttgtcgtttatttttgaaaatagagacactttcggggtaactttgatctaactttgatttgagttcgtaaaaatggataaccaattgacttattccaagacgtaataaccatggtgtagaactttgatccttgcttaaggagatatatttcatgtgaaacaaattcaattcatttttgtcagtcgttggggtaagatgtaaattaacagacttatagggtaatgataaatttttctctaatgagttatcaaacaataaatttatcagaatttcaattactttcgataaatcattcaatggatgcaatttagtaatagtagaatactctctagttcgctttttattaaccactatggttttctggaaactcgaaagatcttcatcttcgtcagataaatgcatactgtcatcgacttcggatgatgcatcaacaatagccgaaaacacatcagagatttcagatttactggatctatttgatataagagcagattgattaacttctggggtcacttttgctgaacctatttcatttggttctttttgatcaattaacaaaatgtatggtggaatgatgttagcaaacaaagataattcatttattaatcttctagactttatagctttgatatctagtaagaactggattccaatctcataaaagttatagcaaatattaacatttgtggatgacaagtttatcaaacacctattaatcactttaaatattacaatcaaagattcagattcttttttgctttcggagaatatgtacttaaagtatttattcaaaaattgtaatgttttcaaataataaccagctgctttatcatctgctgacattaaaaataagttacatgtagtaaatgatgggttcaaaatttcatgaaataaatatagtagttcaataatcaaactttcatttttggatgattgaaatacatttgtcacaagtagattcatacaaaaaagacatttctctaaaattgattggattgtattctcaaacagatgatctcgaaaacattgaacttgaagtaaatgaattagagattttatgaaattaaaagctattggatcaaatatttggacatcagaattagcaggggtataagttaagtttttaagtaatgagtttatgagtttttcactttgtcttggtttgtatagattaatgaaagttttattacaataaattgaagttattaatgattttgttattgatgaagctttgtttaaccttatctcaacggacgtattgttatttgatttttcataaatagaacgatcagtttcgatataataatctaatgaattaagtaatttgagtaaactttcattatcaaataaattaattgttgatgataatgagaaattaaagttttcaagtttttgaattgcttcagttctatctcgtatcttggatgatagtaataattcttaaaatataacaagagtttaattctaatgttagtaacgcgtgattatgttgatatacgaagtgacagaaatacataccacaaattgagtctaaagagtttcgtaccatattaattgactacctttaatcaattgtctttcataagggtatcttggttagattaactgttgcttgtaagaacaagaaacaagcaaaaaagggtttgaagaaatcaagtttctaaaaaaaaatgctgagcattgaaaatacacgacaaaatatagttactgtcttagtttttgttcaacttattttaccagtgaatatacagattcttaccattttgttactacggttgtagttgattaaagagaaaaaaccacttggttaacgaattaacgaaatttttatgcttgttatacaaagatgaaattattatctattaaaattttataattataatttaaatttaaatttaaacaacgacaccagagtttgaagcaattcttggccataaatcagcacattcctttgcaactggaccagtaatagcagaacctttcatttcaccctttggattaacaataacacctgcattatcttcaaagtaaaggtaggtaccatctcttcttctccatgcctttgattgtctaacaacaatagctggcataactttctttcttaattctggcttacctttcttaacagttgccataaccatatcacctgcagaagctgctggtaatctgtttaatctagcaccgttacccttaactgccataacgtataagtttcttgcaccagagttatcagcacagttcataactgcaccaactggtaatgcaagctgtaataataaaaaaaatagtgataattatgttagtattaagtttctaaaatgaatggaaaattggtaaatatattggataattgtgaaaattatttattaaaattaaatttgtagtgaaaatttgatggtttaaaattttgtaactaatcgtatcatttaaaatctgtttattatgtttgattgtcatgtgaattactattaatccatatatttgaatctgttgattcaatctaaaaattattattattattattattattattattattattattattattattattattattattattattattattattattattattattatcactatattattactaattttgggaagttccctttattaatggataattaagtagatgattcaaaactattgtaattatttaataacttatttcactttgtatttcattttgatttcagtttcactacaattgttataattgttaacaaaaaaaattctctatttatcataatcatatcatttaccttgagttaaagtctgaaaagtaatacttactgacattctaaatttagtaccttgtgcaccggaaccagacatcttgatatattagtatgaatatgtggtattctaccttttagaagcaaattcaaaagtctataatagtaaagtattcaaccaacatcttcatgaaaattctctatagtacaaatatttttttttcaccctcgctattcctcctctcctgtaaatttcctggccagtcacagtggattcccaatgcggaatataaatttaccattttgtgcgtcagaaaagttataaaaaataaggtgagggtttggtagccctttgcctgatcacgtgtgtagaattgaaaattcatgatacataataaaggttttatatcatgatttcatgatttcatgattttgataagaacttttttattacaagacattcaaattgaagttatatttataaaagaaaagttatataagaatggctatattataaatcaccaataataagtactgttaataatcgaaaactttctataaatcgtaatattcctgcagatattgttgaacataacaagcaactcttttatacctcctttcactatatttttggaaaattgttttatgatgagtttcagctgatatacaacattcttctaaaactttagctaatggaattaattgttcacttgtataaccagtataataaacatgtgcttcagtccaatcacctttacctaacattttacgtgataagaattgtgcacctgcagctaaccaacttggtggtgatttaacaaatctagcatccataattgtaatttcgaggaaatattttgctaaagttctagtttcattatcataatcatcagcttttgaaccacgtcttaagaatgacattggacctggccaaccaaattcaaatcctaaaacctcaaccataaatctttcagcttttaaaaatgcatctctctgaaattgattaccaaccatataaaccatttgagaaactgttggtacacgaatttcttcatattttgctgcaataaataatgcaactgcaccacaaagttgaaatcttgataatgatattttatttttacttaaaaatctatcaattatattaactgataaaaataatgtttcaggtaataaattgaatcttgaatgaagttgtaccagccaatcaattaaagttgctctatgttcccatagaatatcatcttgaatttcttcgatatatcttggatttggtttatatttaatttctaatgaatgcaaataattgaaaattctattaccatattctgcaaccattgttacatcataagtatcctcatcatttggatctaaagtttcacgagagaatttagaataaactctatcaatttcatttcttatactatcagttaaaattggtgataatggagtatgtgtagttaaatcatcttcttcatattcattttcatcttcctcatcttcttcaactaaataatcgttatagtagtcagtttcaggtatataattttcttgatcattatttatgtttgaagtttccatgacatcatcaacatcggaggaagttaatggtgattcagttatggtatcatgtgattgattatcaattaaaacgggtatcttatttctaacattattgttgcttgtattattattattgttattattgataatattatgatgattttgattatattgttgatgaatattttgattatgttgttgattaaatgaatttaatgcactttctgggacaacacccaatactgtacgtgctctggcgttattatttgtactttgagaagattgagttgatgatgatgaatcattattgttagatctatgaatattatttgattcgttatttgatgattttgatcttaaaatttgattattattttcatcattagtattttgtgattgtgatctagtggaagctcttctaagcatttttgttatttgattttgttaattattggattagtaaaaaaataaacgaattgaattaaataaattaagtgaagtgaagtaaagtgatatgaagttaagttaagttaagataaataaaatatttcttttatgtataacttccgtttctctttgaaatgatataataaccttttaaatggattaatattatgtctatgttaaaaaaaagatttctgtgaggagtagttatttaacttgaaaatgtgataagtagcttttctattgaattttcagtaagtaaacaaactgtttattatttgttttgtaatatatactttttatgatttaaagaagcgtggggtatagatggttttagtattgattaattatagtagataacttgctagaaagatatatattaaagaaatcaataacaaaactgtgataataataataaaagttgtttatacttagatgaagatagtaaaaaaaacaaagtgaattaactagctaagaaacacctggaaagcagacgtgaattgatataataaaaaaacaaagagagaaggattaatgataatattctgaagaatagagttattagaataataatcaaaacaaaaacaagtaggtaaaagtaaactaaggtaaactgaaatggaattgaacaatagacatcaacagtgaaatataaacaagggtattttccagtgtttacaattgccctaaaaaggaaagtgaacattatcgcgtttggctctaaatttccgaaaaatgggtaaatatactctccaattttccgagtatgaaaatttttaaatacatgaaaattacgtaaaaacgaaaaattattttttttgcgcttctcgattaggaatcttaaattattattttttttttttttggtttaatctttaattaatgattaatggaatttttatttgctttgacaattgcaataatacacatcaatgacatttgttgatagaaagaaatacattaaagaaggtgatttagttcttgtttatgtctcacgtacacttattaaacctgtttatgttaaaagtggtgaacatttcaatactagatttggttcattccctcatgattcaatgattggtcttgaattcggttctcaaataacaactccaaaagatcgtggatttgtttatcttttacaaccaactcctgaactttggacaatgtctttacctcatagaactcaaattgtttatactccagattcttcctatattttacaacgtttaaatgttaatgttggttctaaagttattgaagcaggtacaggatcgggatcttttactcatgcttttgcaagatcagttaatgaagaaggtaaactatatacctttgaattccatgaaaccagatatttaaaggcaaaggaagaatttacaaaacatggtttaaataatttaattataacgcatagagatgtttgtgaaaatggttttgaaattgacaatattgatttagatgctgatactgtttttcttgatttacctgctccttggagtgcaatacccaaattaactaatgttatttcaaaaaatcgtacagttggaatttgttgtttctctccctgttttgaacaagttgttaaaactgtcgaaactttacaagatgaaggatggttagatattgaattaacagaagtgcagggtagactatttgaatctcataaagcaatgaagagagaagttgatgatgctgttaaacgtttacaatttgttaaagaaaaacaacgtgaaggtcttgaattaatcaaagctggtaaacatccaaggaaagaagctgaaaaagattatggttttaatccttttggtaagggtaaacgtataattgaaggtgaagatggatatgaatggatgaatgtttcaagacttgaacatgaagttaaaactcatacatcttatttactttttgctaaaaaattgcctcatcatgcaataaaagttaataataatagtaataatacatctgaaactatttaattattatcttgatatgtataaatttatagaattaatttaagattgtaataatgtatagatcaaagattgtaatattgtgaaatttagtctgcctgcgcaataacatgaaattttgacacaatttgcataaatttgatgaatcttccaatgtttattctttatccacatacacgtcttatcaacaaaaagagtttaattgccaatgatgatagtcaattcattaaaatattttggcttttctctcataaaagcaaaaacaaactattctttattaaaaatctatcccggtacttaccaatttatgtctttggttcccaactcaaaagaatcaaaattaagctgtaacttattacaaaatcatccatcttatatacccaaaacaaatgcaattgataaaatgaaaaccatcattaaccatagagcttttagttcgaagaatcatcttttatcatattatcgtgatcctaaaaattcaattgttggagatggtattataagtagattatggtctcgtattcctgatagtattaaactgattagtttaattgttggttccgcttatttagttatctttgttgcagttccaatactagtcatgattttacctccaataattattggagggtggttattttttcgtataaataaatattttagagaaaaggaaatgaagagaagatgggaaaatattgaaaaatcaacattaatatattatcctaaaaatttatcacaaagtcaattatttgttccaccacctgaccaaatcaataatgaattagcaaattttgaaataaataggataattgatgcattttggtcaaatgaacaaaatatcaataattatttcaaaattgaagatattgatgatttagcattaggtacactagaagcaattcagtattcttataataattcaagtgttttatttgctgatgactttaaaatgatggtcattcaacaaagaccattatatgatagaaaaattgagaaagaacttgctaatgttacattaactttaaaatgtttaaataaaccaatgtatgaagatactgatccaagtgcaaatattagtaaaagtttagttgaaattgagattgtgccaactaaactgtttgctaaaccatttgtattaaatacaccatctgtcagtacaaaaaatcgtggtgatgacgatgatacatttgatggtaatgatgatgattcagattttgatgggattatcgatgttaagggtaagactaaaatcttataatattcaattttttattattttatcaatctatttagactttacgacaattattataaaaattctatctttagatatagatgtagattttatttaaactgtatcatattaaatatagatctactctgtagttcttggtttattcttttcagcttcggctgccttttcatcttcaatttctttcactataacttcaatttcttcatttgacattgatcttggatcaatacctggtttcataacacatatttcaatattttttgcaccagtttgaacaacttctaacaatgctttaattgctaattttattgtttcactctcatttaataattcatcctttggataatttttttctaaaaattctctaacagttttactattttttccaattgattgagctttccatgcagaatatattcctgatggttcagtttgatataattttggaattttatcattttcatcaaaacctgcaatcaaagttgaaataccgaaaggtcttgcaccaccactttgtgtatatttttgttgaacacctgcaacatatctagttaaatattcaacactaactggatcttctaatgttaatttatgtgattgtgcttcaactcttgctttatcaattaaaattcttgcatccgcatttaaacctgcaaatgcaagttgtacatgataatcaattttattaatctttgttggtgtaattcttggatcttgtaattttaatgtagttcttctctcacatgcaagtacaacagtttcttcacctttaacacctactgcacatgtacctcttttaactgcttccagggcatattcgacttggaaaacatgaccatcaggactattttaaattaatatgttagtaaaaagatctaaatatatatcttttcaatttcatacatacctaaaaattgacaatgcactatcgtaaccactcattattgcgttctttgttgtataaaatgataaaaatcagagtatttgccttcaagtattgaaaagcttgaaatacaaatcatcatgaatttagagagtttcttcgcactgtcttttttttcttacagtgcctaaaaattattacactgggaccttaatctttgaattttttttaaaaaaattgtaggagatatgaccgataatcctggaaggagtaattcatgtaaggttgattctggtaatggtaataatcaaaagcaaaggcaaaagcaaaagcaaaaggaaaaaggtaaaggaaaaggtaaagcaatgaagattccaacaaatatacctaaaaaggatcattttcaaagagttacttatttatataaacttggacatatgatgtcaatgaaaagtaataataataaaactaatgatactttatcaagaagttatttgaatcatatggatttagttagtaaaaaagcagttttaaaattacatccagatattaaacgaactatttgtaagaaatgttcaagatttcaaaatataggattaaatagttcattacgaatacgtaataattctaaaaaacaattagataaatgtgatattttagagcttgaatgtagatgtaaagagattaagagatttccgattggtagtaatccagaatatgaattatttagtgaacgacaggatagattatttgaaatggaatcaaaatcaaaataattttcattaatgtacaaagtagttgaaataagataatttatatataatttatgtattatacgaaagcaccatattctaatattttaacagcatcttctttctttttattcttttcatctcttatatcttttttaaatctattataagcatcaataaaatcaattctttcccagccaattaatgatttatcttcaatatcaatatctaaatcaccaatcattcttaaattttcacctctaataacataaatttgaggttttaaactttcaccatattgtttagtttcagggaaataaactctttcaacaccatcatgaataactaaattaccaaattgatcaaaagttcttaaaactccaataattgaacgtccacctattaaaacagcattaacttttctatcaacaaatccaataatagcagcagctgtagtaaatggatatgattgtaaatatatgtcttcttggaacatattgtttgaacttggttgaaggaagatgttaactttatatacagtaacagaattcaaagttgtcatgaagattgaattttgcgcctggttgaaaaataccgaaattattaagattttaggtaatacagtgaatcaagtattgatattacatcgttgtgatatattagaggtatttacaaagagaatataatatatattataagtagtagaagtaatgtagtgaaaatattttagtgaagtacttaaagaaatccatttgcctttcttctgtattcattacaatctcttaaccattgtctataatcttttaatgaaccaattttttcaccataataatcaggaactggattatttatactttgtcttgaagcatcaactctcattttagcaatatgtttaaggaataatttttgtttgattttgaaaactggcattgattttctatttaaaattgcaaataatggatcaccaataattgatgggccaaaaaggaaacctgcaaatcctgtacataaaattgcaccaatatagcaagtgaaaatatctaatccaaagaaagtttcagttggatcaatttcaacttgtgataaatatgaaaatgatcctaacatggttaaaattgctgcagctattgatccaataccaccaagacgtctttgttgtttacgtaaagataagaattgttcccaagtcattttacttgcaatttcagcttcttgtgctgttggttcataatctttctttgatgaagttgaattaaaacgtttattaaaagaatttaaaaataaagaatttgaagattttaatgaatttgataatgttgaagttctagataaagtattaagttgacgaagtccaagaccaagtctaagacccatagttctagttgcaaacattgttgtgtgtgtatgtgtatgggaactgtcaataagaaaagacttacaattaaaggttaaattagtagggagagatggtgttttaaaatagtgagcgaaatggtatttttttatgaactcatttcttggtattggagttaaggctggaaaatcctagaatattgttataataataactttgtagaatctaatatttttagtattttaatagttgttatagaaattttatagaaaaggactaattaagaggtataaaaaatgatatccaaatagggatgtgtatatgatatgtgtaaatgcaaaataaaccgtaataatgaatggatagataaatagctaactacttgtatgcaagaaattttctttttatgaatgattaatttaatcatcataattgtgttctaaacattcaggtaatttttccattgggaaattttcatagatgattctataagtaacttcaaagagtgggaattttgaaatttcacccatgttaactaagaattcatgaacttctttacaagtgtgcataccttgacaagattggccatttaataatttttcttcagcttcaaaggctgagactttatgttctgccatatatttaccaactctgacattacgaccacctgaacaagttgtgattaaatctgcaacaccggcagattcataagagaaagttgaatcttcagcgtttttgaaaaacattttagcaaattgaattgtttcacataaaccaattctcataacagcagattttgcattatcaccccaacccaggccttcaacgaaacctgcagccattgcaacaacatttttgagtgcaccagcaattgatataccttcaacatcactgataactctaacatggaaataaggtctatggaataaacatcttaaagtttgatgatcaatatctttacctttacctctaaaatcttttggaattgaataagcaacagttgtttctgaccatttacattgagcaacttcaggagctaaattagcaccagataaagcaccacaatgaataccaatttcttcagtaattgaagttgataataatttacaaccatcaggattaacttgtaaacctttaagacaagagattgctcttgtatttggattaactttaccctttaattgagacagaattcttggtaaaaattgatgaggaatattgaaaataattaaatcagcattttcacaagcttcaacaatatcaggtacagcaataacatttgcaggtaatttgataccaggtaaatatttaacattttcatgctttgtatttataattgaagttaatttttcaccttcaattaattcttcgaaaacccacatattaacatttctttcaaattgtaaaggtctttcaacagtattttcagcaacaacttttgcaattgttgaaccccaattacctgaaccgacaactgtaattctaaaaggtctttcaggataatcttcaggatctaaagaagttgaatctttacgacgtgggataattgtatttgcaattgatgataatctttcagcaggagtagtacacattgtatttgtatttgttttatttaattgattaatttttgattgactttgagtatgtaaaaatttatttgtagtagtagatttaaattttaaatttaaattatttcttatagtagatgtagttaataacttctttgataagaattgtttgataaatagagacataaaataaaaaaataaaaggaaaaactagaaacggataaataaatcgattgagataaagaggaatagggtccagttatatagtgcaaataggtaaaaagataaaaagaggtaaattaattaaaaaaaaataaaaagtaagaaaatgcagaatcatcgatgatggacacactatttccgtaagaaaaagaaaagagaagggcgtattagcctacaaactgaaacattttcactgggaagttacgtaatggttaccgtacatgtcatagtgacgtagccattatcttatcttttgggctattactatgcttatgtcttatctttttgatatattgtattactactgcattacatcattatttttaagtggttaacagtaaattagtttatggttttaagtaaattagtcttgtgtacactgtagagtgtagactattaataaaatgtaatgtcacgctgttttcttttattttggtgtattacgtaagtataagtggattatgtaattaaatgtgattatgtaatcatttacaatacttaaatatgtgcaatatacatgcagttataccattctacattcaatacttacactacaattaataggaacagatatttatttggtacattatctcaatattaattaatgttaacttattatatttatttaatttagaaaaatttttattatattataatttaaaatggtacacttccaagtgttgtaccattacctttactaacttgtaatcctaatccattaactttacaattttcaattaaattccataatgattctctaattgttttattcttttcattaatttcatcaatatccataccatcatcattattattattactattaccctttttacccttactcatttcttcaactcttctttctgcatatttaatatttctattcactttctttgcctttttatttgacattatagtatttgcaacaactcctccaccattcttaattggtacaattgctaatgatccattagatgattgaattgttgtaactgcttgacgtgaacgtattgctcttctctttgataaaagatgtgatttcctttgtcttgtaatattagctttgggtttattaacggagttcttagatggcatattgtcttgtcttgtataatcaataagataatcaataagataatgataatgattatatgaaattttattgataatgaataatttgtaaaaaaattttcatgttaattttttttttctcactaagggatcaaaaaatatataagtgtaatttaggattcgagaatgtgtaaaaaagtgcttttaactgctgggctaaactagagatgaagtgatttaaaaattattttataaaccgctttttgggggtttttacttttgtccctcttttacaacttttttgtaacttacaaaccacatctttgccaaataacaataaataatgtactcaaaagcattatttgactccttaatcaaagttttacaccatttttaaatctcacaaatatttagattttttgtgtaacatttcctcaaaaggttttaaaaagttaaatttatttgaaacgtcaataacttttttataattataaaactataaaaacactctatacatcagctatacctctcttttcaaggttaacttgaacttcatttcttaaatattcaatcatttttgatggatcatcagctttaaagacagaagtacctgcaacaattacatttgcacctgcttcagctgcaatttcaacagtacctttacctaaaccaccatcaacttgaatatttaaatttgggaatttttttcttaattcttcaacttttggcatcatatttgccataaatttttgtccaccaaatcctggctcaactgtcataattaatgccatatctaaatatggtgctaatttaaataatacttcaacattagtatttggtttaattgcacacgcagctttcatattaaaagatttaatcaatttaattaattcaactggatttttagttgattcataatgaaatgtatattgatcaccaccagattttgcaatttcttcaacccattgttcaggatttgaaaccatcatgtgacaatcaaaaaattttttattaactggtttatcctttggaactgcatttcttaatgatgttataattggtggtcccattgtaatatttggtacaaaatgtccatccataacatctaaatgaacccaatctgaaccacattcaaacatacgatgacattcacatccaagttgagagaaatctcctgcaagtaatgatggggcaataattggtttaaccattgtttaataaaagaagagatgtgtattatagtttacaaaaatggattaaaaacatggggtcattaaatttgtaattaacagtaaaggaatatttccataattcctcaccataaaaaattggaattttcttcagtttttacattgtaatttcggagttttagtgatcggcattttaagtgaataataactttgttatctaaatagataactatactagtataaaatgttcttgtttataatatatacgataagtacttaatcttcttgttctgataatgtcttaaaatacatctttttagtatcaaatttgatacctctttctaataatttactaaaagcattagcaaaaacatttaaacatttttcttcatcctttgcaaaaatttcaacatattttcttaaatttgaatcagttttcaatgccatatcagctggtaacatcatcaaactatgtgttttttcatcttcatattgttttttaccatcccatttcttaaatttccattcttcacttaataataaagtgaaaaattgatttgaaacaacagttggtgagaaagtccatggaccatcaaaacctgaattttgtttatgacatctaccaattgaatgaccaacaccaattaatgcaactaattcttcatcattgaaacccaatctatcatggaaaacatttcttaaataactacctgttgtttgacttgcatcaggtaatctatgatatggtggtgtataatcagttgataaatcttttctacctggtctccaagcaatttttggaccttccatttcttgaataccaacaacaccggaaagtgtaaataaatcacctgttgaaatttcagggaattcatccttaattgattttaaaaattcaatacctgtcactaaacctgcattttcaggatctgcttgttcctttttaaatctcattgtaccagcatatgaaccaccctttaattcggaattatcattttgatcatatgatccactattatgccaagctaatctaactaataatggagcataagaaccataatcataatcatcaacatcaattaatttttgtgcaattgcattataaactttttggtaatattctttattttcaatttgtccatttgcacttctaacatttgcttcaaatttattttctgaatcaactgctttacttgcacccaaaccaaataatgctttactgaaaaggttattattgttattattgttgttatttctattattgttataattataagctaataaacctgcagatgcagttaatgcaattgaagccaataatttagaattgtatttgaaatgtgatttagtagattgtttaaaagataaacgtgcgtaattgttaattgcagacatcttatttgttgatatttaaagaaagaagggaaaaagaaaaagagaagtgtatgatactacaatttacaataaagctcaagggaatggccaagcattaaatacttttaacaaagaaatgaagatagaaatgaaatgacaaatcatgaaagaataatttgtcagaatgatataatggtctcgaatgaaaatcagtggggttattaataattaaaacctctttggggctttcaccattattgtaaaaaaatgctccattttctagctgaacatcttgtgcttttggtatgtgatattatattaataataacattgagagttttaataatagatatagatctagaatagattcaagaatgaaaatcttagttattagatccttctctttcataggcttgccaagccataagaaatagagtagagcaaagtaacaatgtaatgtagggctatgtgatgttttgacgaaaagcttgtaaggttaaggctttaaggttctttaaggttctttaaggtttaattatattacatcatatagaggtttcagtaatgagactaaaatcactttccccaatttactatcaattattattcagtattttttttttacttttttatttattttttaatgattacaggattattaaattaaagtgttaaaacgttcaatttaataaaaactacatcgaaattgcagcataaatcataggtagctcactttattagtctcggagctggtaatgattagccattttttctttgatattgtttcctaatattccatgttaaatctttcttttaaatttggttattaaacaaacaaaaaaaaatcttaacttggaatttttgtaaaacaataatcaaatgcctttttttgtaagtgaaatcataacccaaatagaacaaataaaaaaaagactaacatagataattaaaaaaagcaatatgaaatttgtaaaatgtcaatgtggaaaaatgtataagaaaacaatctaaatgaatgtataaactagtttaataatttttattcttaatttatttataattcttcaacaatgtgacctctttcagagacatagataccatctaagaattttctgatatccttgtttctaactctacagatttgttgaacatctgcacaagtttgggaaacatcttcaacagagttaccagtaacaattaattcatccttttgaccaagttcacaagtaacaccggttgggattggaacttctctgaccttcttgtcacctaagaaatttctaatttcaataagtttagaaccttccttttcaataacgttaacgttaattgggaaatgcgcataaacaaatttcatcttgtatttgtaaccaacggtaacacccttaattaagttagtaattaaagatttaacagttcttaaagtagcaacgtgctttctgtcaccattatgaacgtaaagtttgattaatttgttgttaactttttcaaaagcaacatcaacgtgttttaaagctttaactaattcacctcttggaccagtaactttaacaactctggatttgattgagacggtaacaccttctgggatagcaacggattcaactgattggacgtacttcattattaattacaaggaacttttgttgctagaagaaataaggtaaaataaaaaacttatagataggtgtcatgccgaaatagttgaaagatcacatccttctcttttaaagcgaggaaagtgaaaaatttctgaaaaattttgaaaatttttttgtgcgtctttttctgagggagttcctcgcttttcattggctaataagagaatgggtcgatcgaccgcaccgcccccttgaaccacttattttattgaatttttcaattgttcagtatggcaacatgaaaatatagaatgaattaatgtgatcaaaggtttagaaaagtatattgataatatcgatatagtaacaccaccattatgtattctaatagtatatataataaaacagtgatactgggtaataatatttccaaaaatatattatctaatgttagaaattatcatccagtcgtattaccaaaagctataaagaaggcaaagagtattgaaaagaagaagaaaaatattgcatttaagaatacagttgaaaataagagggaaaaagttgatccaattttaggtaaaccaaacaatccatttattgaaagattaaaattagaaattcaagaaccaaatattttatcaaaaggttataatttaaatgatgttgatagattattatttggcgcaaaggaagttttaaaaaataaagcaattaatttaattggttcaacaactgaatcaattgaaaatattgaaaagaaagaaaatgaaaagagagaaattttattaagaattttaactttaagaaatgctgataatgttgaaaagcaaaaagttttaaatcaattagcaattaaagaatttcaaagatttgatggtgatactggttcatctgaagttcaagctgctgttatgactattgaaatttataatttaatggatcatattaaaaaaaatcctcaagataaagttcatattagaaaagttagaatgttaactcaaaagagacaaagaattttaagatatttaaagagggatcaaccacaaaaatatttttggacaattgaaaaattaggtttaactgatgataatgttcatatggaatttaatatggatagaaaatatatggatgaatttgaaatctggcctggtagaactttggttaatattaataaaaaggaaaatgaagaattaaagaagaagagaagaatggaaaagcaagctttaagaagagcattacatgaaaaacttttagcaaaggaacaacaaattgaaaatgaatctcaataattgtgtgtctatgtgtgttatctcatgtcatgatatctgattatcataataatcataatttaatctctaatttttataaataaaattctgtaaatatataactacaaaacatttcgtaatgtcttttttttttgcatttaatcacttttatacatcaccgatttcatatttaccccttttagcatcattaactaagatatatttattacattttggtatctcattttcaacatgtccaatgattaaacatgttgtatttaattgatcaattaaacatttacccttgattaaatcttcatctgtcattgcacttaatgcttcatcaagtattaaaattttaggattattaataattgatctaattaataaaactaatttttgtttactaacatgaatttccccaaatttaaaaccttttaaattatcaatttctaataattttaaaaattggttaattctattaactttttcattacctagctcttcaatagttggtggtacataagatccaacaatataacctgttgaaattgtttggaaaactgtatgtttctttggatataatgcatgtaattcaggtgatgtaaatccaataaatttatttgtatcaaaataattaactttaccaggagatctttcaataccaaatactttaattaatttattccaagattgtggatgatctagggttataagtgataataatgttgttttaccggatccattacgtcctctaatatgccatttttcaccatttttaacattccatgttaaatctttaataattggtttattcttatagctaacagttgtattattcatttcaactattgatttagtagggtcaattaaattattttgctctatttttttaattttacccatattcttacttattctatcttctaaaattttatgcttttcattgaaatttcttttcaaactatttaaatcatctaataaatctaaccttctacctgatttaacaatacctgtttcatttacaatgacaacttcatcaatccattcaggtatatcatcttgatttcttaaaccaataacaattgttgttttaatattttcatcatgggaagttttcattaatatattatcaacagttttagttgcaactggatctaaaccaaggaatggatcatcaatacataataatgaaggttcactatataatgatttagcaattctggcacgtctaaattgtccattacttaaagttgttaaaaattgaccttgtaaaccaactaaatttaaatttttaattaaataattaattttatctttattaaattcaatattcgaattataggattgatttgatataaaattttctacaatttcatcaatttcatagtctttgaaaaattcatatcttgaacttaaatgagtaaatccaccggttgaatcatgagcaccatgaccccatgaaccattattaacaaatcttaataattcagttttgaaaaatggatcatttaaacttgatgggtaagttcttgaattaattggatgtgaaataaatttatttgtcaaaactgaaagaaaatcggttttgggatagtcaccaataacagcaactcttgatttagaatttaacgtatagttaattgaagatgaaaaaaccggtctaatatcaccattattgttattagttggttttaagtaattgcttttagtactaaaaatagatccgccagatcttgtaaaccaagcatcagagagttgcaccaatgcagatgttactttactcattgcccccagtgtgtttgcaaagcaaatctgataaaccatcaaatttcttttcttctccttctccggaccggtgtaggcttatttgcaaccgacaagaattcatgtaaaagattacataatcaaacagacgcatcgaccagaaaagaaaaagaaaactctgtacaccacagaagttgtattattaatagtatattacgtaatggttccccccataatataattgctgagattgatttcgtctgaggttgtctgttgatagtttgtttacattgaagcatctgctctttgaagtttttcaaatttatcttttatcctttatctcaattcttatttatctcctcttataatccttgtagtatatcatttcatttattattagagtatctagggatattctatctatttcaatttcaaaaaaattcttttattaatctataacttatcctttaacgttattatattcattcatctttcaaatatccaatagcattttcattttatattgtattacattatctatatccatttgtgttttcacatatagttcattaatttattttatttcattataatcaaaaaacaaaaaaagattcaacaacctattacaatatgagtaaaacgtatgatacttcagaactttcaaaacatgtgcccaatccaccagtaaataacttatcaattgaagaaaaggcagaaatggaattcggatcactatcaagtgataaatatttagcttcagctcaacacgatccttcaattgagatcagaactcaagttttagatgaaccaccttattatgttgttatctcaacttatttaaattatttaactttaattataattggtcatatcagagattttttcggtatgactttcatgcctcaatattattctgcaatggttgctaaaaatggttatccaccttggtattcagcttttgaatcattttatccaagaagattaaagagaagattagatgattgttttgcaagaccaatttatggtgttccaggtagatatataaattgttttaatagagcttcaacagattataatgaaagtttctattatgatggtactgcaactccttgtttgaatttatcttcttataattatttagggtttgctcaaagtgttggtaaatgtactgatgattcaattgatgcagtttataaatacggtgtttcatcttgtggtccaagaaatgttattggtacaactgatttacatgttaaaactgaaaaaatcttatcaaaatttttaggtaaagaagattcaataatttttagtatgggttggggtacaaatgctcatttattcacttcaatggttaattcaaaatgtttagttatttcagactctttaaatcatgcatcaattagatttggtattagattatcaggtgcagctgttaaagttttccctcataatgatatggaagcattagaaaaaattttaagaaattcaattagtcaaggtcaatcaaaaactcatagaccttggaaaaaaattttcatttgtgttgaaggtttatattcaatggaaggtacgtatgttaatttaccaaaaattgttgaattaaaggaaaaatataattgttatcttttcgtcgatgaagctcattcaattggtgctttaggtaaaagtggtaaaggtatttgtgaatattataatgttgatccaaataaaattgatattttaatgggtacattaacaaaatcttttggtgcagcaggtggttatatttctgcaaataaaaatatttgtgatagattgagattagatataactgttaataattatggtgaaagtataccaccagcagttttacaacaaatttcaacttcaatgagaattatttcaggtgagctaaatgataatgaaggtgaattacgattacaaagaattgcattcaattcaagatatttaagattaggattgaaaagattaggtttcattgtttatggtgcagatgattcacctgttataccattattgatttataatccagctaaaatgccacgttttagtcaattattattagagagaggtattgcagttgttattgttggttatcctgcaactgatattatttcatcaagaattagattttgtatgtcagcagcacttacaaaggaagatattgatttaattttagctgcttgtgcagatgttggtgatagattaaatttaaaattttcaactggtattgcaggtggtgaaagaaatcctggtgattggaagaaaggtataaaaccaagatggtcaattgaagaagttatagaaaaaactcctgaagattgcagacatgaagtttattaattatatccaattcaatctctattttatttattactttatttttatgactttaattcaattcaattctataaattcatttctatatttcatttttccatttcatttacatcatatataattaaactctttttataaaaaaaatataatatttcataactaaaaaaaagttaaataaaataacaacttgctacataatagtaataatcatagtattattattatcagattatttatttgttttaaacgttatcaccaatataaccaataactgaaagtaagaaacctgtacctaatataacacctgtataaagatgactttctgaaatttgtgataagattgatttataagtttcttcagctaattcaactctgttaacaacaggaactgtaacttcaacttctttttcttcaagttttggagtttgattacccagatcattataagatgaattatctaatggagaagtatcttcttcaggatttgaaacttcagttacagttttcttttcttgtctataaataatcttctcttcttcattcttaattaatttttgttcattattaaatgaataatagtaattatatcctaaagcaatagggaatgttaaagctgcataaattaaatatggatgtttaccataacttggagatttagagtatgcttgatagaacaaataacttgaaattgaacctaatgaccaaaaacttaatcttaatgatacaaataatttacatattttttcctttaaagatttataatcacctgctgtatttgcaacaatttttggaattaattgaaatgatgttaaaaaatatgatccacttgtgataccaagtgacccaattcctactaatttgacgattgttaaacacttacccatatttatttaattgattatataaattaataatttacttagtttggaaaggaataaaggttattcaatcagttaaaatgggattataaccaatatttaaatgatgattaaatgtaaagatgaaagattgacatctcccccacgatctttaacaatcttttaagtattacctttccctcagtttctaaaagggaattgccttatttttctctaaatttaccgcggaaattacagcctttaatacactccaattttccgatggtagataagtatttctgtaattcttattaaacttatcgatgagttgcaataaatggatgaattagattatataatgaatataaacatgtaaaaaaagggatttaaatttgatttttaaacaacgattgtatgcaagattaaataactaacaaaattttaagtaataacgaaaatggaaacaaaaagacaaaaaaggtataaataaattagtttaaaaataatgcttaaaatgtttataataatgcaacaaataataatgcaaggctattaaagccagataaaagtttaacaccatcatttctttgagaagttgaagagatactactgactgaaattgatgaagacgaagatgaagaagtagttaatgttgatgaagatgatgaagatgatgaagttgatgaagatgatgattgggtagtggaaggagatgatgatcttgggttagaagagaaagatgcagaagacaaagatgcagaggacaaagatggagatagagacgaagatgaagatgaggatgaggattgtgtagatgagtagactgatgatgattcagtactagaagaagaggaaacagacgcagatgatgatgcagatgaagaagatgatgcagatgcagatgcagatgcagaagatgaagaattagattgtgaactagatgctgagcttgaacctgatgatgacgatgctgatgatgatgatgacgatgatgataaagttgttgatgtgaaagctggagtagaattgatagtaaatatgttattatttgaaccataagtcgaagagttttctggttgttttgcttgtggaatttcattattaataatgtcaatatttcttgaacctccactattagtacccttagctaatgaaatagttaaatcttcaagatctgcaaccatataaacactgcttaaaaatgattggcctaaagtcatataatcttcacttcctgatgacagaataccaaatgcacattgatctgattttgtattagtttgggtatataaagtaattaagaatgatgaaacaggtatatctaaatttaaaccttgaaaattaaatcttaaaattgaattatccgcaatcgaacatgcaccaacgtaatattgtaaactttctgaatatgataaatcaaacaatgaagtaattgaattaacaatactatcaggaaaataacttaatgtagtacccgtatctaacaaagcagcaattgcacctgaaccaatttctgcaacttgtgaagattcttcattaataaatttcagatcattcactgtaacagttaattgaattggcgaatcaacattttgattatataatgcattaacaattggtaatgaaactaaatcaccagtatatttagatgaatcaactgccccaaatataatttccgaattagatgaatcatccaaataaacagaatatgcagctttattaataagaccatcactgacaagttttaatggtaaattttcataaatataaggagatgatgaaccttgtgatgtaacttctaaaccaccaagaccaataccaagaacaccttgtgcattatcagtttgatcacaaactgcaatattcatattttcaacttcaatattaccaaaatcaattgtatcttgaccccaagtaccttttgcaaatgtattatctgcatatgtaatactgaaagatgtaccatttgaatggaatgatgaagacttttttgaattaaatgtaccatattcagaacaatcaatttgtggagcagaagaagatgaagatgatgccttattttgataattatctgtaatattatcattgaaaattttacgaccttttgatttgacagtacctgcttcacaatattcattatctgaactaacaagccaaaaatctgaggaacctgtatcaactaaaacaccgactttttccttatttgaaccaaccaagacatttgccatataaaaagtttgttcatcaattaatgatagactgacataatctgatgtatcgtctcttttaacatgatgtttaatttgaacattagagacaactttttcagcagataatgcccaatatttttctgaattagatgcaaatgtaacaccagtaaaagcactgaatatggagagaacactaagtgaaagcattccttattggtttgattgaatatgtttttttttaaagatatgggtatataaaaaataaagaaaagagttataatagagtgaacggaaagtaataagtttttattcaaagttatgaaacaatagtacctggacaaagaacctgcgtgaaactgttatatttaatttgtcaactcctatcaatggaagacagaatccaattatattgcaatgttaatggttccaataatgaaagtgcaatcagaagaaaaatttgttaatgagagggaaattataaattcattattcaacggaaaccagccactcacattttcccgatgaggaaggtagcatgtttattttaggaattgtaattacgtggtgcatccattgactgcattggtcgactgttatactaagttattatgtttggagtgaaatagttgtaaagagtgatgttaagtacattatgttaaataaggtagtataaataatattacagattgtatcacagtaatgagagaatcatccatatccatgtaaaacatcgactattactagtattgcctgcgttattggaaaccttagctatcgactcaataagtgagtgtgaagatgatgtggatagtgaaatgagagaggtagatggtgccactgatttgctgtttataagactctttttgtggtatgtgctgtgtcgatcaaaatttgtcttgatagtttcattaagagtggagtagatcatatgttgtaaatcataagttgttgaatctggtggagtctttagattttcaatatcttctattccattctctaatacaataatatcactttcattggatgggaaaactgcatttgctaatgcaacagattccgaatctaaatcaacaaccatgtaaatactatcaaggaatgattgtccaagagctataaattgttgcatataagtttcagtaattggtaaaccacataatttttgattatcatgcatatatgcaaagtctaaaattggtacactgaagtttacaccttggaagttgaactcaaacaacttattatcaagtttagaacattctgcagtataaatattagcctctgaatcataatctaaatcaagttcattagcaattttttcaagaattgactttggtagcattgcattagttacaccagtatctaaaagtgcagacatatatccatttgcaactggtattttttcatcatctttcaaatttaaaattgaaatttcatttaatgtaattgtaattgcagatatattttttattcctactaatgaatttccattcaccaatggaaacttataaatttctccatcaaatttgttgttatcaattgcaccaaacaacaattcaccgtgtccataatcttggtctaaatatattgaataaagatttctatcgattataccattttcaactagtttcattggaaaattattgtacatatactgcgaaccatcattaacatgataataagtagactcacattctggtaatccaagtccaagtagtccaaaatgttgtgacgtgtctccaactactgcaaaagtcatatttcccaataatgtgtcattaacaaaaaaattatctgtaccccatgtaccattgacatattcaccataacctgaaccataaaccatttcaaaattggtatcattagaatgaaaagtctctgagttgtttatgtggaaatatttatcattattagtattattcgttgattgcgacgttttaacccaagtatcagaagaacccgtatcaatttgtaaagttaccaactctttttcagaaccaacttcaagatttgttacataattcattccttcaaattctaaatccaatttgagatatttatcagcatttgcagctgctaataatagcagaattgtttgaataatcatagcaagatattatatttgtgaaatgaaatcaacttgaaataataaagctatgaatttcttttcaaatattattttcaatcaagtttcaatacttgtatgtacctttggatattatatatagttttgaataaagaaagtatctttttttagcaagctaacccattgatgaataaacttgtgtatcagatagctgaatccagtgtgaaacgtcttgctatcgtatcaagggatttccttagcattcccaaagtagtattataatagtataaatctcaattaggcaagtaagccgattttatctttagaagagatagctccttaagggctcatcagtttttattatcgatgtaattgtatatattctattgccatcttattgttacaacatatatatacatatacaatgactaacggaggaaccaagcatctagatagtttaaagcataacatttatgaattgcatcaaaatcatgcagcaacagatttattaaacaattctgaaaactttatttcacaattaaagaaatacagacaggaactttataacgaaaccagtgataatctctcacataaaaatgaattagagaaagaattgagtgtgaatatcgattattataatgcacaaacatccaaatatgagaaacatattcaaaaaggtattaaaatgtatgcaacccgtattgataaattaggtgggtggaatttagatactgtatataaatacaatacaattgatgatgatactcaacttatgatgaaggctattattatggatcttttataccagggtaaattaagtgaatctaaagagttattggaaagtttggaaattgatgagaaacgacaatttgttgaagtttataaacattttgaaactttaaaatctttaattgagtcactacacaatgaagattataccattatttatgattggattggtgaagaaaaggaaaatattatgaagataagtagtctaattgagaacttgaatatgctagtttattttcaagtattagagataaaggccaagcaaaagaagattccaccgaatggtaatttacttttaaagtgtcaaaatgaatttgatgcacaagtaatgaacaaaatcaaggataaatgtttaagtttagataatagcacatggttttcagcttcattaccagaattgaattattttgataaagaagctatcaagaatactacagaggctgaattaattaaagttttcaacaaatataaaaccaattttttaaatttaaaggaagagtccccattaaataaatgtttacttgcaggtaattttgcaattgatactctgttgaagttcaatttagttagacgaagaaaaagcagttccacaataaatcgatcaaagggaggagcaacagtaggaggtaataacaatactaataatcatgctaataacgatacaagaagaagatcaacaatatcatcagatggatcagttcatccaattttaaatagaataagaagcttgaacacaagtgataacatcaccgatgaaaacgcgttttatgatggatgcgttttccaattagagaatgagtacacattatacggtgaaaatgatcaacaagaagttagtgaattgccattagagattgaattacctgaatggatgtcaagtcatacagtttttgtatgtccggttttaaaggaggaaactacagaaacaaacaaaccctgtatgttaccatgtagacatttcatttcacgtctagctatgaataaacttgtccgaggagtaggcgatgagattaaatgtccatattgtccaggtcgtagctcctacagagaagccaaggaagtgcagtttgtaagaaatttaaactaggaaggttaagcgatgtttaaggtaaaatttttttttcactactaaatttattttctattgcagattattgatgatataggcctactgcacctgagtgattgactataattatataacctgtgttgattgggaaaatccagctttatatcgattatatacacataaacataagaaatggcagcagcagatatacgtactcagaatagaagatccagaaagaagagaagaactgaagtttcaagtgatgaaagtagtgatagtagtagcagtgacagtagcagcagtgataacagcgatcatagtgatgttgaaactaaagatgttgaaattaacaataaagaagatactgtaatggaagatgttgttgatactgaagatgttaataacaacggagatacagctattgacgcgttacagatagaaccatctttacaagataaacgtgaagttttagagacacgtcttaaattacaggaagtatcagctgcacttgcaggtaccttaaatggatcaaatagtagtatttcaaacaatttacctatagatagtgatgaatggctgtcgctaatggtttctaattatggagatgatatcgatggacttcgacaggcaggtgacttcaaagatggtagtgttgcattagttgcagagcttcttagatcatcacaaaatgtatttgcaccacagtagatcatcatatatatatttagaatattctgtatattttagcaatatattactaaagaaacgccaaaaaaacttaaacagtgcagaccatgtcctgtgatttggaaaaaaagtataaagggaaggaacgaggcttgttattttttcatttcgttattgtatatatatctaggggtcttcaacttaacatctttcttttccttaactttctttatctccttttctttcttcctttatacaaatactaacattcatctagtagatatgaggtccgctttaatattgtctatatttcttcaacttgcagctgcctctccaattagaggtatcactgatattttttcagctgatacacctgctgatgtcaacaatcaatcttccaacaacgttgaaactgaaaaaccttattatcttagattatctgccgagaggtattacggtaaaacttttaaagaagctacaaaaggcccacaacctcaaatttatattgaatcagatgagctcattagagaagaattagaaaagagagataatgataccggcgcatatgatactcaaagcctccccgaaggttcagcatttttacaaatggtcaaccaaaatacattttatttatctcttcttgacattggtacccctgctcaaaaagttggtgttttagttgatactggttcctccgatctttgggtcgttagttcaaataatagttactgtatgtcaggtactacaggtgctcttacaaattttgatgtttttagtgaaaagagaatttctgaagattcaattgcagataaaaataatctcatttatagaaatgattctactgatgaagaatttcatgcaaaagcatcatcatcatcaagttcaagttctgatgcaattaattgctcagtttatggtacctttgattcaggctcctcagaaacttttaattcaaatggaactagtttttcaattacttatgccgatggcacctttgcaaatggtggttggggtactgatgatttaacagttggtgattttaatgttactaatatgtcatttgccgtttgtgatgatgcagataatgcaatgggtgttttaggtattggtttacctggtttagaaactacttactctggtacaacttctgcatcctcaatctttagatctccatatcaatatgaaaatttccctcagagactcagaaatttgggtttgattagacaaactgcatattcagttttcttaggttcatcaaattcagatactgcagatattttatttggtgctgttgatcattcattatatcaagatcaattagttgctttaccaatactcaatactctggaatcaagaggttatgatgatccaattcaattggaagttacattgaattcggttactcttgtaaatacagatacgaatcagcaagcagtcattggtactggtgcagctccagctttacttgatactggtactactttaacttatgttccacccgatgtcttatcaaccattttgaatttaattaatgctagatatgtctcatcagttggttattatattgtcgattgtatggatacagttgattatgaattaagttttaattttcaaggcctcagtgttccaatttcactaagtagatttgttatttctctgcaaagaaatgatttatgtatggttggtttacaatcgagcgataaaagttcatttactctaggtgataatttcttaagatctgtttatatggttgctgattacgataacatggaaattggtttggctcttgcagatacttctggtggtaaagctgcaaatattgaagttttgtcaactggtattccaaatgctgttgcaccaaattctgcattagaatggaatagtaaaactacttctttatcagttcaaacagacgttacaatgtcagcaattccatcaactactaaaaaagtagaaaagttttagaaaagataaaaatatattacaccatcttgaattttcattgtttattattaccttttgcatgaaaaaataccataattttaccgtttaacatttatacattttatattccctgttttgtatttagttcgttttgtatacctctaagaaattttaatttaagcaaagctttatataagagtaaaaagggaaaaattgcatcttctatatacataaattgttacgtaatgttagattttagcgatgatagaacttttattagtggctgcaacaaccaaattggttcctttaaagtgtatatcagtgaaaagaaggcttctagaaggcaaaaacagctaaaatgtcaacctttgtctatttaccattgaaaaaaacaacagatattgattgggaaagctctttgaacacattcctaacttcaacatttggtcgttcatttacttctgaaatatcaccatctattaaaactctaaataagttacgtttagatattcagcattcttcaatcaaagattcagatgtctcactatcaatatatgcagattatattagtcaattgaactcattgggtttaagattaccaatggatatcatgctcagatcaagtaaattagagttttcatggagtgaaattgattcaagttctgatggtgaatatttccaacaaaaatcaatatcatatgaaaaggcatgtattttattcaactttgcagcatcttatttgtatttaggtattgattcatcatctagaattgattggaaatcatctgtatcttttttcactaaagctgcaggaatattcgaattcatatcaacacattttttacatgcaccaactgaagatttaaaagttgaaaacattaaaggtctttacaaattatcacttgcacaagcatatgaatgtttcttttggaattatatgcaaacatcagaaaccaccaaacattcattagctgctagattatctgaaggtatttctgtaattttgaaacaagctaatacttattttgataagactagtatcaatttaggattcaatgatttaattgaatttaaaatcaactatttccactcacttgcattatatcattatgcacaaaactatgccgaacttaataaaattggttttggtttaagagtattaaaatcaacgaaaatttacatagcaaaatgtattggattaaagaataaatcaaataaaaaaactgttttagaaccaactttcattcaacttgcaatcgaattagaaaaagatatccttgcgaaggaaaaagaatgggaaaaagataacgagttaatttacaaccaagttttaccaccttcaactgatgtcccaactataaaagcaatgaatccttgtaaacctgttgattttgagaaacatttaaaagagtttggctgtaaagacttattttttaagatcataccaatggaagcacataaaggtatgtctatttattcagaaaaacaagctgaaattttacgtttatacagtgaaaaggttctcatagctaatcaagaaataaagagtgtttttgaattttcaaaattaccttcaagtcttgttgaaatagaaaatttatttagagattcaaatcctgttctcaaagaagaagacagggagaaggaagttgaatatcctcgtgttttagccatggctcatgaagttgagtcatcaaaaactgtggactttaagttttatctaactgaaaacaataataagaaagaacaaataacaaagtcattttcaaaagctgacgagttacttcttcaagatgagaaaaacatgttggtgaaaggtttacccgaaagtactgaattgtactcattgaaagagaaaattacaaaacttcgtagaagtctgatggaagcatctatcagtgattccaaactcgagagtcttttgaagcaatacgaagaagaaattggcgttttaagaggtggtacagagagtgttcaaaagtggttagacaaatcagataaggaatctacattagttcaacaagtttcattattagatttagatgacaatgactccaagtcttcagaatttgataaaaagacagcagagcagttaataaagacaatctattccaagaaaaaatctcttgaacttttaatagatgaaagagattctactttagaagatttgaagcaaataatgcataatgaagatatttcatctgttctaattaagtataacaatgcatctgaaggagagttagatatactatttaaagaagagcttgagaaatattccaattataccggacgtgtagacgccctcatttctgcacaagatggaatgatcatcgatttgaaagactcattaagacatttacttgacctggatgtgataaagaaaagaacggaagaaaagaagaaggaaagaaacactatcagatccagactctctaggctaataaatgcttatgatgcgtggaaactttgtgcaaagggtattccggaatcaaactcattttattctgctttcactgaacaaacaatgaaacttgttaatcaaattcatgatattgtgaaccaaagagacttgaatgtctccagaaacagtagtatttctagtagttatacaggaaacttaggctttggaggctacactagaaacaatatcgcaccaccacccccaagttatgatacatctacaaattctggtgttcctcctattgttccagcacttccatcgaagcctacaaataccggaagtggccaaccatacactacaccatcagtttatgatcctagcatgtattcacaatttggaaaagactggaaataaaataatgactgtgtaggaaacttaagcaatatataggatctgtgtaaaattttttgtaatattgctatgatataagtattttttctaccacagtgaaatatttttttttccgattgatggttgaagttgattgaaaagtttattaatgctacaactaaagtcacatatagtacgtttgttttctacaattaggacgaataaaatggctgaaagtatacctagaaagtcagaactcacaaagcatgataagtggagaactggagcacatcaaaactttgaatcaacattgaaacccgatgaaatacctaatataagggaaaaagagtcaccattgggtgaagaatggtgtggaatattcgaaactaaagttgaattcaagacacaacatttcatgaccgcaatgtctaatttaatcgatagtcctaacattaactcaactgttatacttagagctgatattttacgtagaaataaatttatttatttttcagaaacagacgaaattaaaacagacaaatacgttagtccaaatatcgatgatgaacctttattaacagaaccctgtgaagctgttctaactactaacttaaatgatacagactttaggaaagttccagtatctcccgattttaaacctcttcatgaaattgttaggagaatgataccaagaaacccatcaaaagattatattatcaatcaaacgtgttatataatgtcaaatgttaaaacaaattcaacattagttctttacacccctaatatctctggtccagaagaaactccattttatttaccacctgcaaaatctattggtatcttattcaacggtaacgagtccactttatccatcgcttatttaccttttgagtcgcatgaccccaatattttcaaagatatgtcaccatcagacagatcaattagaattgcttatagattactaagtactgcaaagaaacattcaaatggtgtaatgaacggatataccaagcgtgttaatcacgatcaagttgttccaaaacaacagttccaagatagatacattttattgaaacaaaaatatgcaaaatttttagttgataattggtgtgaatcaactgatccaagaaaacacgtctttgaagatatagcaattgctgcattcttgattgagctctggactctgatatatccatcaaggcaaagttttgagtttcgtgacttaggttgtggtaatggtattttggtgtacattttaataatggaaggttataaaggtcaaggtattgatgctagagctcgtaaatcatgggattcatttcctgaaaatattaaaaattctttgaaagaacaagtcattattccatcagttttattaagaccacatccactccaatatgcacaaaatccatgtattgttgataatgaacaagaatggaaggttcctatttatgataaagcacaacatcaaggtacagttaaaaataatggaaaaaatgttcaattggttgaatgttatacaagtgctgaattattggcagatcctcaaattaatgttacagagttccatccaaatacgttcatcattggtaatcactcagatgaattaacatgttggattcctttattaggatatccattcatggtcattccttgttgttcacataccctttcaggtgacagaactcgatatcctgtaataaaaggtcttaatggtagagcatcacaagatggatcatccacatatcaagggcttgttgatcatgctgaatatcttgcaattttatctggttggaaagttgaaagggaaatgcttagaattccatcaacaagaaacgcagctcttattggatatcaaagaagtgaatatgccgctaaatcaatctacgaaattattgcaatggaaggtggtgcctccaaatgggtcgaaaatacaatggctttaacaaagaaaaaaccaagagatcactagcttggagattaactctttgcaatttattagtatacgggtacatactttagttgaaatccatctagtagattttcttttatatagaatcataataaatagaaacaatttgtaattttaaaccaacatttattcagtaaatttattttttaccttgttttctttgtctacgtttcttaccaataatttgtttgacttccatggtaacatcagcactcttattttcattattagaattaccggattcctttcctttatttccaacatttgggcctttattcatattacctcttttgtttggtttaccattgtttttcttttgtcttttgttaccatcacggttatcattatttgatcttttatcaaattttttgtcttttccatctctatcatcatcgcttctctttctctttggatcaaatccactatttctacttttcattatttgatcatatcttcttttaacaacactagcattttcaattgcaaattcaacaactaatcttcttttattgatagtcttttctctttcagccattcttctctgttcttctgttaaaccacaaacaatttcttgtttagtgacttcatgggcatttaaccatcttaatgccattaaagcattcttatgatccctgaattccaagaaaccataacctctagatctaccatattcaccagaacctttaacttcattaataactttcgcttgtgaaacaacaccatgtttagaaaccttctttttgtcatcatcatcagtgatacctaatttttccaaaacaaaatgtttatgtttagtagatctatcaatttcttctttagataatggttgtcttttaccttctttaacttcagttgcgaattcaacaatagcttttctacccaactgtttgaatgatttgtcattcattgctcttggaagatttctaattgccaatctagtcattgataaatgtaaaccagggtttttctttaactgttcaagacgcaaattaaaagatctttctctgatatccatatcaccttgacttagtagagttgccaatttggaattaggaccaattctaccttcatttaaaagatataagtttcttttatcattttctttaggaactcttccaagcatttcgtttctattatttgcactcttctcagctaatctagctgcagattctctatcaagggaaggaacaatttgcataatacgtccttcgtaaacataaaatggactaacatcatctggcaataaaacagagtttggtgaaacagcaggtgcatttaaaagacattcttcatatggggtatttttagtaaatgcaacaaaggcagtaccctttggtaaaccagtttccttatcaacaacaggaagtgcatatttgactggacctaatttttcgaaatgagcttttaatgattcttcagtaacatcatagggtaaattacgtacaaaaacagagtatggttcttgtctattccttttacctttttgttgtttaggttcaatatcttcaaattcgagtaattttgcatcttcttcattgatattgtcctcttcttcatcctcgtcttcctcatcatcatgatcattcttttcagcaatatcttcagcatcttgttcatttggtgtttctttttgattttcagagttatcactgttttcttctttttcttcttccttttcatcctcatcattatcataattatcactttcaccattttcttcttgtttagtctttatagtatcccaatgagttttattcacagcaaaatcaacggcaacttctctaccattaattttcaaacctgatgattctttaacagccttttctgcatttacatgtttagccatagtaacgaaagcaaaaccacacattttgccatctttcttcttaggtattttagcttctttaactggaccatattgtttgaaaagtttgactaactcaccactatccttaagattccatggaagatttctaacaattaatctggcagtctttgtcattgcaacatcttcaggttttggtgtatttttagtacttgctccatttgctttaccttcttttctttctcttcttttggcaacatcaactcttaataatctgtcatgaaatttattcttctttgattctttcaatgcaattaaagtatcttcatcagatgtgaaagagacaaaaccaaatccacgtgatttattttcaccatcattgacaataactgcatgtttcactggtgcaaactgcgaaaagaattctgaaagttgatcatttgatacatcaaatggaatcgaacgaacaaataaagtttttctatctaaagaatcatctttaggtgcagcagtcttagtatctgacattgttattgacttctattcttactctttaaagtgaaaactgacaccaaatgaaagttgaaaaatttaggttaaaaattttattttttatcaaaccaaaaaaatttatcaagatgaaaaaaaaaaaaaaataatgtcaaaatctgaaaaaaatcaaaatttctcaatctgcggaaccaaatctctttaataaaaaagtcgtgttttgtttacatgacagttgattttgaaaatcagaacgattgtttcagagttattgataacgataactctttgataaagggatagttggtatatacttgtgcatattaaataagtctatgaagatatcatgcctccaaaaaagagaaagattacaaactccgggattttatcaaattcttatatccctccattaagagcttcagagattgaacgtgaattacagaaacttccggcagattcattatttagtttgacccaactttggctaacaatatcaataacgcaaccgagtttgagtaatcaagataaagaagatggatacacacgacagtctttatcggaacaatatttgaaagaactcgaaaagttgaaagagattaaaagtaaagcacaactgaagaagaaacttgtcaatttgatactagtaaaattctacccaaacggactaaatactttacagcttgcacaaatagatgtacaattgcttgttgataaaccaaatgtgaatgcatgggtttcttcaactgccaaaattgtaaattcagtagataagataccaaaagaaaacattgatgatttgaaagatcaaacaagaaataatattataaatgaattatccaattttacctttaagttgaattcacagttgtttctagagaatttcatcacaagtttatcaaatttataccttactcatgtttatatttccagacacccttactttccattacttttgataagagtacaaatgtatgattattcaaatccattgaagaccaatgtgaaatctaaaaacttacttgcagatcttactaatgttacattggaccgaactgctaaaatggaattcgaaaatagttttcaaaatattttaaacaaccgatataaacaaaattactctgttggaaagaagaaagatacaagtttacagagacaaataaaaatacagaataaaccacaaatcagatcacatcgccccttttatattttattacctatttcatcaccacatattattcattcacctgcattaccagaagatctaagttccaaattgattttacaaaccttagaaagtacattatcacactcataccatcaaaaggataaagatcaaaaaaaggtaaataaagatcaaacaaccaaaagaaccaacttttcatcaacttcatctaatattaaaattatgattttcagagatgctgatattgtcaaccctattcgtaacttgagtacggtttttacaatcaaaggtatttcaagatttgcatcagcattaggcgcatgggggccatatgctcaaaacattgttgatattggagttttcgaaaaagaaaataatcatttgataataaatcctgattcattcattgagttagttgacaccgacgagaatgatgatgatcacattaaagagagaaaaatagttgcagggttgagattcaagggtagtttaactaaaatgaactctaatggtgtaatgaatgttaatgggaggccaggaaatgccggtaacggtagcgtagttattttagattctgatgatgatgacgaggtagatgatgtaaataaaagcaatgaaagattaggattcttggagcaagagaaggaaaggttgaaagatccatatgcatcacttgtgccaattcacgagaacaacttctatatcgaaggtgatctttctgagtttatgaataagagaagaaacaaaaaagttcaaattaaagatcagaagataaaagtgggtatgacattattgggtaacgatatatttggtggattacatgagttagcagcaagaagtgatttagatccttatagtatgccagattggcttactggtgaatcaggaactgttggtggtaaagtgatcgatagaaaattagtaaaacatgtataatattaagaatttatagagcagtgtataatatagttagaggaatatggatttatatatttttattttttgatgagtttatacgtctgattcaattataggatcaaagctacggtgaacaatttcagatatagcttctgaactgaatataggaaatgtaggagcaagtagtttttgtggaggcgaacaacctgttagttctagattcacgacattactttgtttcgtgtcttcaaaaggatcatctgaggatatgaaattaccagccgaagaagataagatgtagtcaaattgctgtataggttttaattgatgtcgtttattattgttggtgattggagttgatatttggttgggtatactctcaaaggagctactttgctttcttttcaagtttgttaactgagatacctgtaataattgtattggcgggtgaaattcagcttgtgatcgctgagaatagttattgattgcaaaagtgctaaaatttgaggaatctatacttgaatctatcaaggtcatgtcacttacacaactattttcattatccatttgaaattgtgaatcttcattcaactgaaataggttatttttatctataacatggcacatacaagcatcagctaaaaacattttttgagcaaggtcaatagaatcatcagaattttgctcggagttgatggtatctacatcagtatcattaatatgagtgtacaaatcaggattgaacattacatcattggaatcacctttcagacgggttagtaatttacgtttaactcctgaaactatatgcaactgacgaacagcagccactgttgatatataatctcttgacattgtctctgggaagaagattatttgactgatttttgaacactttataccgaccctgttatcataatcaattgaaaagtaaacaaaaagccgagcctccactttttttattcattgttattgccactcacgtgacattgcgccaccatgtgccgtaccacactcaaaattacccaattaagaaattttgctgattttgcatgaaatttgtgaaaatttacccagccattgatgatcattgtcagaacacattctattcggaatatgctttttcaggtatataatattcctaaatactgtttttattgattaaattgtagttatatctttagaggatgtcccagtgatgatgatctgggttatctttatctatcagtagtagtgttttttctcttttcaaattttcatattaatttttcttttctttatcatatcattttgttaaatattttcttttaattaatcatatttaaaattagagctatcattttatcaaaatgatgctaataggtaagggtaaaataggttatgcttctaaaatatcctcattgagaggattactaatatctaattcacgtatgatatcaagttcaaataatgcacttaaaccaagaccaactcatataaatcaagcatctgctgctattgatactaatattagaccaaaaatgaccaatttatcacaaatgtcatttccttgtcttgaaaaattagaacaacgtacaaaagatttagaggaaaatggtcctgaacctgcttattccaagataacccgtgaaaatgttgaaatttttcaatcaaatgatcctctattcctcgattatggaggttatttaccacagttcgagattgcttatgaaacttggggacaattgaataatgataaatcaaatgcaattcttttacatacaggtttatcagcttcatcacatgctcattcaactttgaaaaatcctaaaaatggatggtgggaaggatttatcggtcctggtaaatatttagatacaaataaatattttattatatgcacaaatgttttaggtggttgttcaggttcaaccggtccacaatcacttgatcctctgactggcaatccttatgcaacaactttcccaatattatctgttaacgatatggttagagctcaacatcgtctgattaaagaacattttgaaattaatacattatttgcatcaatgggatcttcaatgggtggtatgcagtgtcttgcttatgtatccgaatttcctgatgaagttaataaaattataagtatttcaggttgtgcaagaagtcatccttattcaattgcaatgagacattgtcaaagacaagttttaatgactgatccaaattggaataaaggtcattattacggtcaattacctcctcatactggtatgaaattagctcgtgaaattgcaaccattacttatagaagtggacctgaatgggaacaaagatttggcgttgaaagagctgatataactaaaaaacctgcattgtgccctgatttcttaattgaaacttatcttgatcatgcaggtgaaaaatggtgtctggaatttgatccaaatagtttcctatatatttccaaagcaatggatctatttgatttaggtctaagaaatagaacgaaagcttttaaatcaagaaatcaatcagaagatatttattttggtgcagatataaaagattatgaattagagtatgtatcaaatgattcatgtagttttactaaaccaattgaaactaagagacaaagaagattcacacctgaagaatcaaaacaagatttattacaaggtttaagtaagttttcaaataaggatattctagtgattggtgttgaaagtgatattttattcccagcttggcaacaacgtgaaattgttcaaatgttacaacaaggtagtataaataatggtggtgatggtaaaaatattaaacatgttgaattaagtgaatctgatagtttctatggtcatgatactttcttattagcattggatcatattggaggtcctgtcaagagtttcttagattcaaattaatattaattataccatttacatttttcctgttaacaactcattttatcttctttctttcttctgtcttattaaacacatttttttattaccgcttaaattcttttctataaatctatataaaccaacatttcgaaattatacgcaaaattattaatattcaagttttttaccggagatcatcaaacaaatttataacatgataaaaattataatgaaaaaaaatcgaaccgttttttttaaaaaatattgatcgatgatgttatacaaactttttctttttattaatcgaagtaacaatccaatgaccaaaccacagaaaaaaactaaacaagaacaatacactaaatacaaattatcaaggaataaacctaatgaaattgatattattcacttagaagatccaaaagttacaagagaatggttttttgaaaattatataaaaccaaggaaaccaacagttataaagtacaatcccaattccaaaaaatttaaagtaaatacgtcatcattcaaacctgagaatatacttcaaacattaaaatctaacgaagatgatgaaattgatatcgatgaattattacaggttgaagaattaaataatggtggatttggttcaggtaatagaagattgaaaatgaaactcgatgaatttttgaatagaattgaaaagggggaatctttgtatttaactacacaatatactgaaaatgatcctgaaaattgtgaagacaaggatgaagaaaatgaagataatgctgaagaagaagaagaagaagaagaagaagaagaagaagaagaagaagatgatgatgatgcaggatttgcaaacttaaatgaaagtgatgatgaatttacaaatgatatgcacgatgattttgaagaagaatttggtgatgaatttgatggtgaaatggatgaaactgttgaaccaaataagatatatcaatcaccattagacagactactacataataaattaggccatttaccaccacatgcaactgaaatagttgaacctttaataccacaacaaatcaatctctggtttggtcgtacaccttcagaaactgaacaacttaaaattgaaaaaggttcatctggtgaaattttgatgaatcgtggattacctacaaagaatagtacaagtacgggattacaccatgatcatgcagataatttatacgttttagttcaaggtaagaaaagatttacactattttcacctgatttcgcacatcatttatatacaactggtgatatacgaatgatttatgatacaggtgttatcgattatgttagaaatgaaaaagctaagaattggaccaatgtacgtgccgatggtggctgttcagaaaatgatgaggaaaaaaaatgtgatagcagtgatagtgataacgaaataaagcaagatccaccatcatttactaaaatcccaccagctttgttacatttggatgaagctgataaatctcatttgaatcatttagagacttactctaaagcgaatttccctaagtttcatgaaataaaggattcatcagctcaagtaaccttggaagatggtgatttattgtaccttccggctggatggtttcatgaagtcacatcatttggtgacgatgaaaagaataatgttcatgttgcattgaattattggtttgttccacctgatggtgaaagtattagtagaccatacactgattctgtttggaatgatgactttgaatctttcaaagaaacatatttgtaaataaactatataaaccttaatacaacactgtactttgtactttcagaggaaacttaaattttaaagaagaggcatattttggaggctcgacaacataatatttcccactataataagaatgtttgctggaaaaatatttttcacggctaactgtaaattttgtaagaggtcactattattgatggaagaataaatatatacacacaaatctatatatgagtacatgttaataagacaactcagagtttggaaatacagtttatacaaaatgttagatttgaaaagaaatgataataatggtaagaaagttatttctattattggtactacgggtgttggtaaatcacaacttagcattgaattagctaaaagaataaatggagaaataatcaatgcagattcaatgcaaatgtacaaaggattagatcaaataacaaataaacatcctattgaagaacgtgaaaatataccacaccatgtgatgaatcatgtaaattgggatgaacaatattacattcatagatttcaaaaagaatgtaatgcagcaatggaagattgttggaacaggggtaagataccaataatagttggtggtacacattattatttacaaagtacgttatttaataacaaaactattggatctaatgaagagtttgttaaaaaggaggaagatgatgggaatacaaggagtaaaatgacagaggagcaattgaaaattatagatagtgatgataatgaactaatatttgagaaacttaaagaaattgatccgattatagcaaataaatttcaccctaatgattatcgaagaatcaaacgtgcattagaggtatcgtttgtaagaggggtgaaggcaagtactatatacgaagagcaaaggaaggaaagtttgaatagtggaactagtttaaaatatgacacattatttttttggatatattccgaaatggaagaattagatcaaagattagatgaacgagttgataaaatgatgcttaatggtggagttaaagaattaatagacttgtataaattttatttggaagaaaaaagaaggggtaatgaaagtgttgaaaaaatggatgttggtatatggcaagttattggatttaaagaatttttaccatatttagagaaaaatggaactaatgatttacttgatattaataatatagtgaatttagaggaaagggatgaagccattaggaaattgattaatgaagataaggaatttagtaaatgttgtgatgaaatgaaattgaaaactcgtcgatatgcacgtaaacaagttaaatggattagaaatttacttggtccagaattacaggaagaagaaaacaatggatttgttaaatttggcaaaatatttgtcttagatgcgactgatctaaccaaatggggacaaagagtcggtgagagaggtgttaatattacaaatgaattcttatcaaaggggtatgttaatgataactgtgcggaattagcagcaatacctacaacattatgtcatattgataatttaattaagaaaaatgatactagttcattaaataaggttgagaattggacacatcatgaatgtgaagtttgtagagatagagagactaataaaccaattgtttatgttggtgaacagtgggatattcatttgaaatctaagaaacacaggtttaatttaaacagaggtaaacgtaagagagaatatgaagagtggttgaagaggtcaaagaaggaaataatagaataaaagtttatttgagattcggtgatccccgcaataaagatctgtttctttatctcgtaaatttttgaagaaaaaatttaaactgttatcgctgatatatcattttaatatcgatttgcattatgattgtctgattacatatttttgttcgggtttaattttgtttcaaagataaccgattaggaataaaatttaactgtaaatggaaatactatacgataaataaaaaattgattagtaaaatataaaagtcattaaattagtaaagtcaaaaaataaactattttagattaaattagtaaggagcaagttttttttcatttgaagatacatgaggttgaactatttgatcagcatcttcaccaacaatgacaccttcattaactaaactattattattaacctttgaagctcttgaagtgaaaggacttaaacttcttaaagtttcttgaattggatgaggatgttgttgatggaataattgcatttcttcatcaacttcttcaatatcatcaatttcatcttcttcttgagcaattaataaatttaatataacacctaagaaacctgcaagtgcgaaaccttgttccataactaatgtaattgcatttaagaaaccttgtaaaccatgatttggacctgcgtaagtgaaaaagaattcaaaccaatttggaactaatgttgaaccaagaccccacattaatgaacatgtaaaaacaaaacgatcacgtcttgtaaatggagttgttgaaataattttcaaacctgaaactgcaactgatgtgaaaaggaatgttgtcataccacctaaaactgatgaaggaattgcaactaatgcagctgcaaatttagaaaaaacacccataacaattaaataaaaacaacaccaataaccaacagttcttgaaccacacttagtaattgcaataacaccattattttgtgcaaatgttgacattggtggtaaagtacataaaccagccaaaataccattaagaccatcagctaagataccaccttgaattcttgaatcatataatggaccttcaatttctaatcttgtaacatctgaggttgcagtaatatcaccaattgcttccatcattaaaaccaaataacaggctaaaaatggtaaaactaatggaccataaacttttaatttaaaagtatgtacccaaataaaagttgcagcaggtgcaacatcaataccagcatgactgaaataaccacaagcagctgcaacaatacaaccaattaataaaccaacaataacagcacaagatttcataattggagacccccatttttcacaaataataataacgacataaacaaggaaacctaaaccaataaattgagctgaaccccaagcataaccttttgcacaagtacttccaacacaacctgaaccaccagctaaatcttggaaaccagtttcaacaagggatacaccaattaataaaacaacaggacctgtaactaaaggtggaaagaatctttgtaaaatttttgcaggcatgaaggataataaaacttctaataaaccacaaacacaagaagttgcaataactgcaccataaccatctggacaaggtaaaggagtgccatcagcggcagaaggacaaaatccagttctatacatcattgggaaaccttttgaaacaattgaaatagttgcaaatgagacaccaacaactgataataaacctgtaccaacataataaggagtgaaagggattttaaatcttgtaatttggatagcagaaagtatacctgaagttataagtgaagcagagactaaatactgagtttgtatagtatctaaatgagcaaaatttgagattaaaattggaggagtacaaagaccagctaacatagaaagagcatgttgtaaacctaataataaacctaagaaaattggtatatcatcattaagaccaaagaaaggttgagttttctttttagtcatataaggtaaagttggagtaaataaataagcataatcataatcacctaagataccatcttttgttgtacattttttaaataatcttttaaaatcatcctttggattaaatttaaaagtaccatcattttggaatccattagaaaagatatttaaattttcctttgtggaagaagattgagaatgtgaaatttccatatcaatttccgttggagctttattatctgaagatccttgatcatttgatgagaattttggtaatgagaatcccatcttgttgattatgaggtgtttaatgataaattgaaagtaaaatgtaatagtaaaaattaaaaacaaagaaaaatagaaagtaatttgaaattgaaattgaaaattagaagaatgtaatcaagttttatataaataatttgaagtgcaaatttactgatgagatgtagcgataaaacaaaagataagaaaagacaaaattacagataaaataaagtgaaaaatgaaaataaaataaataaaataaaaaaaataaaaaatatgatccaaatagattaaattaattaagacataaatcaagataagagaagataacgaaacattgcagtgacttctcaaaaggaaaaaaaagaaatttttcggtgcggcccgtttcacaggcgttttcggtgttctccgtccaattaaaattataggatgcggattacgtaagggtgctaatatagttttaacgccttctctaattttaattgtaattaatattaatattaaattcactatactttatttagataattaattattgagaatgccatagttatttaaccgattgggtggtgtattaattatattattaattataattaactgttcatttcatgcatcatataaatattgtatgtataccttatacagccctatcaaactcttctctctttcttttaaagatggagaaaatctgctgcaactagtaattcaagtgccattgcagttggtaatgggaaatctggtatatctcctgatgatgtaccacctgttgcccatttattattataacataaatattctgcaactttctctaatactggtccatcaagttcatgtaatgttattgtaccggttacaccttcctcaaatgcttctgaaagcatactttgtaatgtaccactagctgatgcagcttttttactaacaacaactcgatatccatcatttgcaacaagtgttacatattcactcatatttgtatctattttaagagtattaatagtaaagggaatatatgcagcttaataaaaggagtttcttagtgaaattgttgattataattatgtaattggcaatgttccttattatgcatggtttttttacacgctgtgtgtatatatatttttgattaatagtagcaaattcctctttttatatgagaaacaaaccaccaataactaatcaatgttaactaacccatcattgaaatgggaacctttagatgatgtattctatcgttcaagattatgttatgaagatattaaattaccaattcaatccaattttgatgattataatttagtaattggtccttcatcttcagttttagcaatttatccgaaaaaacattctccaatacgacattcacttgataatatattaattacaacttcaaatggtgatatattacactcaatatcatgggattttaatcgtatacccatatcatcaattgaatggactcctaatgctgaattattattagttttatcatcgggtaaatttcgtttatattataattataccggagactttaaagaatattcaatattagataatgataatgataatgataatgataatgatgaaactgataataatgaaactattatatcatccaaaatatcaaattatacattagctttacaaactaatcttaatgaatttataataatcaatgatataaggcgtccttcaaggaaacaatcttataaacaattcaaaactgattcatcaattgatccttatcatatatctacttggaatattttggatgattcgattatattatcaacatcttcatcattatcaatattatcaaataatttaatttcaaatattttaccatcaggtgcatatacaaaaatttcaatctcctataatcattcattagtttcattattaacaattgataacaaaattgaaatttacaattccgatttttcgaaattacttctcacttcactactgtctaattcacaagtgctagatatacaatggtgttcaaatgatgttctcgtattatcttatagtacacatttaatgatattgggaccatcgaatgattcaatttcaatattaacaaattctaaacctttactaaaatcagaaactgatggattgttctattttacaggtgatcaattattttttttctctaaggtaaacattaatactgaaaaaatattcagaattggatcaactgatccagcagctattttattagattcaattcaatatttagataatcattcaccaaaggcaaatgatttattggatttaatttcagatcaattaccaaaggcaattgatgattgtatcaatgctgcacttgaagaatttgaaccttattggcaaaaaatccttttaagagctgctaattttggtaaaattaatttagatctctatgatccatcagattttattaattcctgtaatattttaagaattttaaatttattaagaaataacgaaattggaatatttatatcatataatcaatatctttcattaggtattgaaaaattaattgattggttacttttgagaaatttacattatttatgtttgaaaatcacagatttattaaatttaccaaattataaaattaagactcattgggcttgttgtaaactgaaaaattctcatgatttaaatgataatcaattacttaatttattagctgataaattgaaaaatgataaaatcgactggttaaatctttcaaatattgcatttattgaaggtagatttcaattatctaaaaatttaatctcatttgaaccaaatactggtaaaaaagttcaatttttaatttcaattcattctaaaactaatggtgatgaaatgttatatgctttaactaaagcaaatgaagattcagatgctgattcattattgttgattttatttgaattatttagttcactatcaaatattgaatttttcaaagcaattaatgataaacaaaatgcaattggtttattgaaatcaatacaatatcagcaaagtagtacacttttaaatgatttcatgtatcaagatgatgatatttatggattgattataatatatttgaagaaacatttcataaataccgataaagtcaaaatggataataaacactatacccatattgaaacattattttctaaattgaacaaatctaatactctcttaagctcactcgttaccaaatacaaaacatcagtcaaagttgaacttgatctaaataaccatcaattagaattatccaacgtatatccaacaataaaaccaggtgattcactgtttaagactttatccgatatagtggtggttgatttgaaggttgcattatcatttgctaaaaagtataatatttcatcaaatcaaataataacaacagttttacaatccttagctccaataacttctaaacatgcacaattatttgaatttgcaacatctaattcaattactaaatcatatccacttgaaacattttattatcatttatttaaattaaatatgaaacgtcaagcatcaatgtatttaccttattgtaagcaaatgtcatataaagaaaaaataattgcttatataaattgcgatcaatggaaagaggcagttaatcaagcagctgggaagaatgatataccattattacgtcaaatgagagattcacgtataggtaatgatgctaagatagcaaatgatcaaatcgaattaattacaggaaagagagaaagtatataaaatatgtaacatttcaataatcatcttcttcatcactaaattcaaatccattaatgtatccttcacgtaaattatcaagagtatcctttaattcttctcttttatcattacgacaatatcttgaaacataatttttcatattggtgaaatcagttttcaaagtatcatcaacacttaatgaacttgcaagtggttttttatctttcattatctcaggcattgaatcaacgtattcatattcatgtcttaatttatattcattaattaaatattttggtgtattatctgaacatttactaaaatctttacaatcttcaatagacttgacaatacttttactaaaaatatgtggttttctttgttgctgtgttatgaaaataccattaactcccattttctgaatactgtcatcattccataatgtgtcaatattagtaataaaattttttgagcttgaatctgttaatttatacataatttcggtaagatcacagtttaattctacatcattaaattgatcataaggaactgataaaaatgctgttttttcccataaactatttgaacctatatcaatatcaagattcatcattactattcctgataaatctaagtttgcaaatgttattagtttttcaattctgtccatcttactgactaaattcatatcatcaacatattttgtatctctctgtaatgaccataatacgatttttgatgatttaccatctaactgatcgtcaattatatattttaatgattcagaacaaacacctgaccaagaagaatctaactctacaacactgtttaattgattcacattcccactattttcaaacatctttctcgcaatatcatcgacggaatcacgtattttattgacattattaaatgattcaacaccaatttcatgtaattgaaatttactatcaggtaaattcttcccccttccttcacctgtttgttcatcatagacataggtaggatgtgttatcactgcacgtggatcatatgtaactttactgaaatctgaccaataacttgttcgttgtccatttataccattaccatcaattataccattttgaacattcttttgaaattctgtcattgaaatacttggtaatgtttggattatctcaaatgaggttttaatctctggtttctcttcaaaatacgtatatggatctaatgcaccactaccgtttgaataatcatataatatacttcgtggatataaatttgaaatagttcttgaattttgattagattttggtaaaatatgaataaatgcatctgatcttgatggatctcgaaaaagtctagctgattgagtgttattaaaatgcgttgttaattgattagcacattgtgaaaatgataatgtgattgtttcaggcattagtggttgttaacttttcttcaatgtagccataaggaaatccatcaatctttcacccgaataaattgaattagttgtgattccatcttgatgattacgtaacaatttatgattaacagtgaaatttttttcattagaaatttttttacatgaaataattttttattcttggaatttataactggaactttgtttaaatctataataagttcactttcaataaaggttggaagcctaagtgacaattaaaataaaagattaattatggggaactcgttagaagaacgtttacaagaacattccaatgcatttaatggattattatcacttatacctgcaaaatattattatgatgaagatacaaccaaccaatggcaacaaaaacgtaagtcaaaggaagagcattcattaaataagaagaagaaacttaatcctgaaaataacaaaaatgtttcagcaagggatgttttaaatgaaactgaaaaaacagctacccctgttgttttaccaggtgaaaaattaagagaattattaagaagacaagctgaagctgacgaagcaggagatgatgatgaagaggatgatgataatgatgatgacgatgaagaagaagaagaaagcggagatgcaaatgaagattcagaaaaacttattcaagaaaatgtaactattgtatttgatgataatgaagatactgttaccgaggaagctgaatataaaaaagctgaagtacagaaaaatgcaaaagcacaaaaaggcaagaaagtactcacaaaggaagaacaagaagagaaagaaagaaaatacaaagaattaaaggctaaattacaagctaaaattcaaagtatgagagaaaaaagaaaagcaccaggtagtaaagtaccaggtgcagcaacatctagacaacaaattcttgaggaaagacgtagaaaagctgaacttaaaaaagaaatgaagaagaaaacagtagaagaagaaagtagtgatgatgaagttagtgatttaagtgatgttgaaaacattgatgaaagcacatcaaagaaagatgtgaatgtcatgttcggtaatattgaatttgcggatggtgaaagagtttcaagtgatttatcaactactagaagagttgaaaagaagaaggggccatcaaataatgatataaagggtcatttaaagaaaattgagagagagaaggaaagattacaagatcttgataaggattcaaagagtaagattgaagataaacaaaaatggcaaaaggcacttgcaagtgtgcaaggattaaaagttaaagatgatgaaaagttgttgaaaaaagcattaagaagaaaagaatcaataaaaagaaagagtgaacgtgaatggaaagatcgtatacaaaccgttgcagatgagaagaagatgaaatcagatagaagagatgaaaatcttcgtattagacgtgaaaataagggtaaagatcgtaaatatcaagttaaacaactcccaagttataagagaagtcgtgctcataagaagcttgcaggaaccaagcgtgctggatttgaaggtggaatccgtagtaaaaccaaaaagtaagttttttctaatcaattaatttataaataataatacagtgatttagtttatgttatgttttataattatttataatctaaaaccacatagatcctaaacaatttgtaaacttaagaacacagagagcaagttaaaaataacctgaataaaaaacctggcttttatttttagaacaataaaaaacggaaattggaaattgcttaattaggtaatcgcgaagccgccttgtttgcgtttaacgtcaacaaacagcctttatttcgttcatgacaagtttacgtcccttctttgatctcaacatttcttcaattcataggtaatcttttgctttcaactcagaatttagttgatattgaacattaaagaaaacaacaatgtggtatgtataccttcttaagaaaaagctatcagatttacttcaaaaacatggtatttagataaaaaaaaatattcgtatcattaggtttcatcatttaataacctaattttaaatcacttaaatgtcagatactttggacatcatactaacattagaattttaaaataaccttttactctttagtggtatctttggttacgcaaattataatataagtcgtacaagagggcaaatcatcaatactttagttgatggtttaactaaattagaatatagaggttatgattccgctggtattggaattgatggtgataacgattggtctgaagattccccagttagagaaatccaattatataaacaagttggtaaagttgcaaacttaaaggaagaaatcgattcagctcaccctgatgtttctgaaactttttatagtcatgttggtattgcacatactagatgggcaactcatggtggtgtcactcaagtcaattgtcatccacaaccttcagatgttcttaatcaatttgtagtggttcataatggtatcattactaattatagagaattgaagacattcttaaagaatgaaggtgaaacttttaaatctgatactgatactgaaattattgcaaaattatttaattattattatgaaaaagatcctgaattagaattttatcaattaacaaaggaagttttatatcaattacaaggttcttatggtttaatgattaaatcagttcattatccaaatgaaattattgcaaccagaaaaggttcaccattattaattggtgttaaaactgaacaaaaattgaaggttgattttgttgatgttgaatttatcaatgatccaaatgaaaatcaacaaacaacatctgattcaaacggtactttgatagcaccaaaatcaattagaacttcactgagaaaatcggaatcaagagcaattttaccagatcataatattccaattgaattttttgtctcatcagatgcttcttcagttattgaacatactaaaaaagttttattcttggaagatgatgatatagcacatattaatcttggtgaattacatattcacagagctagaaaaagtgaaggtatgtcaacaactagacctgttcaaactttagaaatgcaattagctgaaattatgaaaggtggttatgatcattttatgatgaaagaaattactgaacaaccagattcaacttttaacaccatgagaggtagattagatttcaaaaataaaaatattattctcggtggtataaaacaatatttaacaagtattagaagatctagaagattccaaatgattgcatgtggtacatcatatcattcatgtttagcagttagatcactatttgaagaattaactggtgtacctgtatcggtcgaattagcatctgactttttagatcgttcacctccaatttttagagatgatacatgtatttttgtttcacaatctggtgaaactgctgatagtatgcaagcattgaaatattgtagagcttcaggatgtttgaatgttggtgttgttaattcagttggttcaagtatatctcgtgatacagattgtggtgtccatattaatgcaggtcctgagattagtgttgcgtctactaaagcatattcatcacaatttattgctcttgtaatgttagctttacaaatttctaataatgttattgataataaggaacgtcatgttgaaataataaatggtttagaagaaattccaagacttatttctagagttcttgaacaaaaggaattaattaaggaaatttcccttaaacatttacatggtagagattcaatgttagttgttggtagaggttatcaatatgcatctgcattagagggtgcattaaaaattaaggaaatttcatatattcatgcagaaggtgttcaagcaggtgaattaaaacatggtgttttagcattagttgatgataaaatgccagtagttgcatttgcaacacaagattcattttctccaaaggttaattccgcaattcaacaaattacagcaagacaaggacgcccaatcttaattatgacagaaggtgatgatttaattgataaatctaaaacttctgcatgcattgaaattccaaaaacggttgattgtttacaaggtctacttaatgttgttccattacaactaatgagttattatttatctgttgcggctggtaataaccctgaccgtcctagaaatttagctaaatctgttacggttgaatgaatttatattttccatgcttcttgtcttttattattccatttaatatattttctcatttatagcttctgaatactaaaataagttagacgattactgtagaggttggttttcactcgtgtagttatatcatagagtaaactaaatagcctttccgatggagggctacactgtgagcatgcggcgtttgttttttttaagacagcttcaaaaatttatattctgtctcgatagttaatggagtccctctataattaaatcgatgattacaatagaattttacacctaagaacatcactgacaggtgaatcttcttcctgaaatttattactgaaagtttgatttatgtttttacgaaatcaactcaaaacttggtcgttgggtgttacacaaataagtaagaacttaagaataaccaaaagaacaatgtgtcaagctataaaccacaagacattcccagatacatcaattcatgagcagttaccaagaaatgtgattccaactcattatgatattaaatgttatgatatcaatcatattaataatgttttcaaaggtactgttaaaattcaatttgatattttagaagattctaaatctataacattaaatcaaaaatatttaaactttgataaagttactattaacaatgaagaattagaggttgttaaaaatgatgaaaatgacactgtcgaatttaaattaaactcacaagaactaaagaaatcaaataaatcagttgagttaattgttgaatataatggtaaaattcgtactgatatggctggattttatacatcaaattataaagatgaaaaaacgggggatttgaagtatattttagcaacacaatttgaatccacagatgcacgttctgctttcccatgttatgatgaaccaaattgtaaggcaaatttcacaatttctattgaagtttcaaaagatttacaagttttatccaatatgcctattaatgaaactaaatcaatttctgacaaaaaagttttcaaatttgatacaacaccaaaaatgtcaacttatttggttgcatgggcaattggagaatttgaatatattgaattaaaaaccgaaagagaatataatggtaaaaaattaccaattagagtttatacgattccaggacaatcagaaactggtaaatatgcacttgaaactgcacaaagtgcagttaattatttatcaaatatttttgatattgattatccattacctaaattagatttactagcagttccacaatttggagcaaatgcgatggaaaattgggggctagttatgtttagatcaactgcattattatatgatcctgaaaaatccagttcattatataaacaaaaggtttcgtatgttgtttcacatgaaattgcacattcatggtttggtaattattgtacaatgaattggtggtcagatttatggttaaatgaatcatttgcaacatatgtcggatggttatgtgtggataatatgcatccagaatgggatgttttcactgattttatttcaggatcaatgcaaaaggcattagatttagatagtttaaagaattctcacccaattgaagttcaagtttatcatgcaaatgaaattgatgaaatttttgatgcaatttcttatttgaagggtggatcagttgttagaatgattgcagaatcaattggtaatgaattatttttaaaaggtgtttcaaattatctcaagaaacatccatttgataatgctaaatcagatgacttatgggattcaattagtgaagtttcaggtaaagatattacatcattagttgcaccatggattagagctgttggtttcccatcattaaaagtaaatttaaataatgaagatggtggtaaaacaattaagattcgtcaagaaagatttttaactgaaggtattaaacctgaagatgatgaaattacatggtggattccaaatgttgataatatgcaaactaaggaaaaattaatttcaagtgaaaatttcgttaaattaaatgaaaatagtaatggtttttacagagttttttatgatgaagaattatttgaaaagattcttaataaattagatgatcttccagcaaatgataagattggtttaattgcagatactagtgcaggtgcaagagctggaatcataaagacatcacaatttttagaattaattggtaaaatgaagaatgaatcacatgttgcagtttggaatgaaattatcgaaagattaaatacattaaagaatgcattttattctgataaggaaatttctgaaaaattagttttattctcaagagatttatataagaataagtttgaagaattaattaaatctaataaattatcatttaatgaacaaaaactagcatcatcattatttgagcaagcaggtatttcacaatttgaagttgcagtctctaaagcattggaaatttttgaatcaaaagatataaaaccacattttagacaagcagtttatagaatattactttcaaataaggatacatgtaatgatgaaatttttgaatgtatattaaaagaagttagggaaccaactacaattgatggacgtgaagttgcattaagatcgttaggagcaattaataatgttgaaaaatatttaccaagaattttagaattattctttgatggtagtgttccagagatggattatcaatttttaatgataccattagcatcaaatcctaaaactaaagtattattatgggaatattttaagacaaactatccaagatttagaaaagatgtttcaatgtggacattagatcgtgttattaaaggatttttaccaaaattagcatcagaagaactttataaagatattgatttatttttcaaagataaagataattccggttatgaaatgggattacatcaaagtttagatagtcttcgtaatgatgttgaatggaagtctcgttctcaagaagatgttaaagaatggtttactaaaaataactattagtttatgtatgaaataaaattatttacattaataactttaattaatattaacgtaaactcattgatttttaaagactagatttattaccgggtgatattttagacaaacttctcttattaccgaacgaaacttggaaaaattcctaaaagggaaatggaaagtcagttttaggccatttgttgacatcctattgaaatttggtgatttttttttcacttttttcctttgtagattattttttctattgtttaatttctcggagagaacggaattgaaataggaacagtggctacatttttataggggtgatgagggtagtgtgttaccgtatagtatggatattaatccctcaaattgtgtttaccgtcattggggctttaaatttggttttactttctggtcattttttgcagaattaaaattaatttatggcatagcctgagggcaaattgcactttcttgttacttggacgtttcttcaatttttcaatgaattaataagatattgttatgttattctttttctggttcagattgttttcttcccatatctctaaacaaagtaattttaaattataataagaatgttaataaaatcattggttttaactagtttattaacagctatttcagcttctccaatttacagaagagaaattgtaaatgatacttcggctaatatcacagattctgaacaatcttcaaattctattcgccaaaacttattatcattattagattttaatgcaatccaagtttcaattggttctgataatcaacaaatcttattgaagttagatactaaaacttctgatttatgggttaattccgacatcaatgaattttgtgaagcttattatccattcccttccattttcaatagttcaactgttgcaaattttacaaaaatttcaaatttgggtagtgatttacaatcttctattgaaaactcattaaatgaattccaaattaatcaagcatcaagtttacaaaaggttgctgcaccaactgcctctgctcaaatagatgatattaaaagttatgcaagtgcaagaaatcaagaaattaaatcagttttatcatctgataaagctgaaatttcttcaaaaattgaaaaatttactaaaactgatgacttttttaaaactgctgaaagtgatgcaattattttcggtaatgatgttacctcaaagggtgctttattagctactaaaattacaagttggggtggtcaagttgcaactcatgccactcatgatggtgaaaattttgcaactaaagttacctctgttggtggtgatgtcgcaacttttgctacttccgttggtggtgatgttgcgacttttgcaacttctgaatttggtattgctacaagtggtgcagttcatggttgggataaacttacttccggttttgcaaatgtcgttggtcttaaaaagagggaaactaccgtagaatctcaaaatgtttcaacagccaaaacatctgatttggttctcactacttccactctttcttcatcttctcaaagattatcttccattgcatcttcatcaacttttaattttgttccagaaaaaactctttctccaccttccaatgttactcttatgaatgacactttcttagtcggtagtttaattcacagacttgaacatgattgttccttatttggggtttttgatgattcatcatctgaaacttttaatactatagatgattacttgtttgtttcatcttctgatgaatacgcatttggttccctaggtaatgattcagttgctattggtgatgctgttgttaatactactatcggtgttgctgatgtttcagaatctaatattggtgtttttggtattggtagatcatcaaatgactcaacttttaaatctttaccttacgttcttgcggaaaatggtgatattgaaaaggcattatatactttaaatattggttcagaatcttcttctatcttattcggtgcaattgatttcttagctattgatggtaatattacttctttcccaatgttaaatactactggtgaacaaattgccattactttatctggattaaatattacttatgggggtgatgattatgatgattatgatgacagtgatgacagtgatgacagtgataacaattacgactatgatgacagtgatgacaattacgactatgatgatagtgatggctatggaatttctgactatgaaattcctgataatgatactttagttgcagatggtaaggctccagcaattattgattcagcttctcgtaatgttttattacctaatgatgtcttaacttcacttgttgaagaattaaactcaacccttgaaattagttacaatgaaactttaggtagatatgctatttatgaagaatctatggaatcaattgaaaatatttccattgcatttgatttccagggtgaagtgttttatgttccattaacaaactttgttattcccgttattgaagaagaaactttctatgtcaataaatcatcagcagttgttggttcaggttataattcatctttctattttgattcatcagttgctgattatatgtatcttgattttattttatcaattttaccaagtgaagatgaaacagttgttttaggtttagacttcttcagagatcaaattactcttattgttgatttagaatctgaacaagtcggtctagcttatcaatcagatgacgcgattgattcactcaattcactcatcaatggagaaaacacacatgcacaaaacgcaactgattacaataattactatggttccgacaatgtcaccagtttaactgcatattaaacccaaactaaaaataaatcatattattgataccaactatttttctttctattgttttcaaatttgaaaatattaaattcatgttataacatgctattatctgcatttttaaatttattatttatttacattattttctctaaagtccgtttattgttataattattacttttcatttgtataaataactaaaaatctatactaatttatttctacagccgcgttttcaaattgaaaaatttaaaaaaccggaattctcggaacacagttcggagttgtggcatgcatgcacatgtgtcaaagcttctttgggacaggattataattccatttctgtagtacaagcccatctggctacttttataatttcttggtaatgctattttctgatataaaggtaatgatggctgaaaaattaagctgaaggattttattacttcctttagtttaaacattctttctactccattcaaacatcttgaaggatttcaaataagcagttatgaatttcaaacttgcattaatatcctcattagctgtggtaaatgctttaccaactctcattagaagagaggaaactagcaattcaagtagctcttcacctggttttattaaacaagatttatatagtggtgtcaatttcaatgctattcaagtttcacttggttcagataatcaaaccgttttattaagattggatacaagctctccagaagtttggattaattctgcattaaatgaatattgtttggcttattatcctttggactattcgaactcttccagctggaatgaattcaatatcgagttacaacaagatgttaaagattcttatgaatcctatcaagctgatgcagcttctgtacttgatcatgcttccggaactgagcaattaagcagttacggtgaagcggctaaaacaaaatattcatcatttttttcacaacaacaagtatctgttgaaagcaaaattagtggatttgttaaaaccgctacaggtgacattccatctagttttgaaactttgggtcaaggtattacttccaaagcaggtgtttttgcaacatctgttactagctggggtagagaatttgcaactgatgttacaagtattggtggtagtgcatacacctttgtcactgaaaaaggtggaaatgttgcatcaagtgttacaagtgagggtggacaatttgcttcttcaatcacatcagaatttggtggtcttacagctgatgttttaggtggttggaacaaacttacccaagggtttgcaagtgcggttcttaaaagagacgaaggtactccaactttaagtattagttcagttgcttatagctcatcatattcttttgtaccacaatatgatttctcaaaccaaacaagcaaccaaacctcagattttcacattgacttggatagtattttcttagctatccaaaatgattgttcattatatggtgtttacaattactcttcttctgatacttttgatactgatgatacctattcaatcttatcttatggtgaatattttgcctctggaatttggggtaatgatactataacaatttctaacgttagtgttgattcattaattggtgttgcagatatctctgatacaaatattggtatttttggtattggaaaatcttcaaatgaaacaggtatcaaatcttaccctgatattcttgctgaaagtggtgaaattggtaagtctttctactctctttaccttggtgaatatgaatccactattatttttggtggtgttgcagaagaatattttgaaggaaatgtcacattgtttccactattaaatgttacagatggtttagcaatcactttattaggattaaatgtgagtatggatggtatcagtggtagaacaaacaattctgtatctgctcttgacgaaaagactccagcttatattgacattatttcaaatccattattacttcctgaagctactttagaattacttgttggtggtttgaattctgttttcaatgtcacttatagtgatacttatggaagatttttattaactgaaaaagttgaatcctctactgataattcaacaagttctgatgattcttatgatattagtgatattttacttacttttgatttccaaggatccttgtttgatgttcctcttgaacaatttgttgaatattttgatcctgatgagcttgcatattacaatacttcgactccttactctcagaatattactaactcctctttcttcttcaatattgatttgaatactacagatggtagtggagacgataacattgattctgatgatgatgatgttccagaagtttacttattaaatattttacccagtgatagtgatgcagttgttttaggacttgacttttttaaagatacaatcgcattatttgttgacttggaagctgatgttttaggatttgctaagagtgctgaagattatgatgtatcatatgatgattctagaatcattgagcctgatgagaaagctgatggtagtgatgatgactattattatatttctgaggatgatgatgaaagtaagccagtctcaatcattttagttaccgatgaaattccatatgcggtaaaagctccagattttgatagctattatggctctgaaaacaatcattaaaattgttctaaatgttatgagattattatacccgttcttttaatttattgattgtatttatattatttctattattgttgtatatttaatcaggctcaaaaaaccttgaaaatttatcttactttttaaaactattataaaattatattataatattattatttgtcaacatacttttataactacaaaaaaacgctttaattttgtctgtttaatcacctaaaaataaagcaaaaaacaaattttttttctttaaaaacgtcttgaaaataattaatttaacaaaacttttattttacaaaattttatttatgcgattattttaagtgagtattaaataaataaacaatgtaagatatgtgtcttataattattgtttcaaaatttttttttattgttgcaaaattgtagttatcaaaaaccagcttacgtaattcatcagcatgaacatttagtacaaaaattaatttttaacaaattccttgttagctcagtcggtagagcgttcggcttttaagaattctttaagaagtcgaccgaaatgtccagggttcgagcccctgataaggagtttaaaccttaattttttgtttttattattattttgtttctttgtacatgatagtaataactgattttttttacttattttttaaattggttttaaagcttattataactgtaaaagttttataaaagaaaaagaacgtagatctataaaggataattttttgtgtgaagaaagttagacatgatgatttctaaacttcgtaatcggtttcaacatcttcatccaagtcatgaatttctattggaggttttgtttcagtgattttaactgtttttcttctttttccggagtcatcatgaggattgaaatcaaatcttttaggtttgtttatagcattatataattgttgattcattttatttatttttgatggatttaaagttctcagagtattatttggaatataattagatgtgtggttaacagtgaatataccagttggaggtggtgagacttgatagtcaattgccttaaattggacttgtggtgttttgtgtttaagatgagattcatatttagaattatagggagagctgctactatttgaatcaacaaaaatttttgaatctaaatccatttcatattcaggttttgcagaaagatgtaaaagtttttgcgaaggtgtgttgaatgtagatgattcgtttcttcttttatttttttcagttgtggaaagaaatggcgactgaagagaattagaacttgtgtttgaatgaatctgtggtatatgaatgtaatttgaagtttgttgggtatgcggatctggttttgtaacaatatattccattaaatcattataatatgattcatttgaagaaacaattggtggtaaatgcaacggtctgtcttttgtcaattttgaagtatccattgaaggtggtgttgagaaaacacctgaaaactttgtataaacatctcttcctggggtatcaataatttttgaattagaatttgaagtggaagaagtgtttgatatatttggtttactcttatgataaatttgactggagaactttttacctggtttaattacttttaatgattttattgcagagttgttttgttgatcaactagattgaacatatctttcagtatatccatcctccttctaccaaaatcaattttatcatttagtgtgttattagtttccggtccaagtcctggaatgacagaagctgtatagattaaatctgtttgtttatgcttgaagatctttaaaatgttaattaataagttgattctttcatctttttttaagtgatcaggctctctatgaatacaaccatgtggccaccaataaggttttgaggaatcacctaatttatacgggtacttagattgcttttttggttcaataactttgatccatgctttagctaataacttacaaggaatttgttgaaattcctcaaaacagttatataaatagtttttaacatcaactttatcatgtggatcgattgacaaatatttgtaagattgatttgaagtatatgagtttgaagtagaagaagctcccgttgattcattagcaatggagatattggttttatttgtgctactactatgatcagcagttatatccaaattatatttattctcatttttaggagaggaagtaacaattttatttgaatttactagacttgaaataatatgttgaaattcagaattgcttgaaatattatgtaaacttgaattattgaatgaagcatttggagtactgcaatcaataccttccgtaatcatttgctcaaaagtacgtgtggaattttggaaaaatcctataaacgtaatgttatgtgatttgcaaacttcagcagcaagtgttttaacagcaagaatttgtgaatctaatgattttgtcttatccatcttttctttttgtttaaattacaaacaatttagagataataaagcaaacaacaaaataaaagtgctgattgtaaataacttacaggtattattatgatatattaatgaagaatatatatgaatatttattaccagtgtttaaaggatatgtaagttttgctaccatttttatttaataatcaacagggataaatgaataccatggaaaaaaaaactttcattaagtaagtttcaaagatgattgagaagtagacacttaaatgaaacacatcacattttttcaacaataggaatcaaattgatgtgaatttattcacggatatgtgatctatcaacaagtccgtgaaatattcaaatcaaataaagaaaaagttaggaacgcgtattataagcgtttcatgttggttatgaaaaatcatttacttttgcacggctcaactaaaaatatgaaagatgtatttttagtattttagataaggatcttatactgatctatcaattgatggtatgatcagatttgaaattaacatcttaattgtgggatcaatagtttggttggatgatacttttttcggatatttaggaatatatcatagattaaaaaggcagttcagctaattttttttcttacatatcattttgatccacccaagtaatatcgattattttaggctaagaatgttgttgtttcaatctatggaattattagataaatgtatataatgaatggtatatcaccttaatgtcctcagatagacgccgccaccaattacttagatgggtgtaattacgcgaatgatacaaatttccgatgaatccacacactaattatggaattatcatgaaattatggactttcacagattatctttagtttagcaatgataaacattccatttaaagcaatatgagtatcaatggatcagatttagaacagcttgagaaagaactgaatggaataagtataaaagaaattaatgaacatccaaccaaaagtcgagaagagatagcttttaatttatttgaacttgcaactgagaaagaaaaaattggtaaattaaatgatgcatcagattactattggaaagcatttaaacttgatgagaaagttgatttaaaatatagagaaaaatattttgaagtactaaaagaagaaaatgaaaaattaaataatggaatgatcaatggtataaagaaagattttgttccaattaaatatgtgaaaccattagaattaaataaaggtgaaattattaaacttttagatagttttgcacattgtgaatttaatcctgaagatgaagagaaaccagtattaataaataaattaccatttgaagttattgaaaatataattgaaattttaattgtaactgatacaccaagttggataaatttcagtttaatttgtaaaaaaatggcatttcatggatttagggataaaaatatttggagtaaattaagtggaattgtatatagtagacaaaattatagagatgaagatgaagaaaaatttaaaaaattaattaaaattcaatggggggttaataattatcaaatgttaaatgagagaccatacttaaaatatcgtggtgtttatataagtaaagtttcatatatgaaagagggagctagaagtgagaattctaattcatggaatttaccatataaaataattacatattatagatattatagattttacagtgatggaacatgtttaaagataattacaatttttgaaccaaagaaagttataccaaagttacgtaaaggttataaagtaaatgaagatattgaattaattaatgaagagagagaaagaatatcaatgaatacaattgagagtccagttgataattataataatagaaattggtttagaatttttaaaggtacatataatataacattacagggtgatgttgaaactaattgtgatggaccagttgaaaaatatcgatttattgataaatttaaaattgtcaatagtggtaaatatcatcgtcataataaacttgaatgggttgatcttggattttatgatacaattaatcattcatattcatcattgaatagagacaatgagaaagactttatatttagtcgtgttaagtcttacacttatcagtaacttatatcagatcagtatataagctaatgtatcaatacatcttgtacaacatattacgtaataatgatcaaaatatcaaattcggatatgagcgagaaatgtaaagaggccagagtcatatcacgtgtaatatgactccgaccttctataaatattgactctttcacagtaaaccaatgacgccgtataagaaaaccctgacttcacctataataatcggcccggcggatggtttatcagttactgagtgcccttttaaaagtaacactgtgaatacatgaaattaatagaagagtgggattgggtgggcaacttttaatcagtattataatttattaccacttagctttaaggtattttttcaggtatttgacggagtaagggttcggataactggggtgacatattgttatcttatatttttaattttaaaagtataaatatagacctcatccccttttatttatagaaattaattattcgtatttatatttatatttattctttaaactaaagtcaattgatcaattaacttaattaacttaattaactatgccagctcaactatttgttacaccattagatgatgttaaagtccttggtgaaatttctgataaaccattattatcaaaatgtactccaaaggatattttaactttagatgctttaaaatttgttgttatgttacatagagctttcaatgatacaagaaaacaattattagcaaatagacaaaatgttcaaaaagaattagattcaggtaaatcattacatttccttaaggaaactgaatatattagaaatgatccaaattggaaatgtagtccaaatcatccaaaattaatgtgtagaaaagttgaaattactggtccacctgatgcaaagatgattattaatgcatttaatactgatgttcatacttatatgactgattttgaagattcttgtgctccaacttggtcaaatatgatttatggtcaagttaatttatttgatgcaattagagataatattgattttactaatgaatcaactggtaaacgttataaaattaatagagaaggtagaagagtacctgttatgattgttagaccaagaggttggcatatggttgattctcatattacaattgcaggtgaaccaattagtgcttcaattttagattttggtttattcttttatcataatgcaaaatatttaatatctcaaggtttaggtccattcttttatttaccaaaaatggaacattggttagaagcaaaattatggaacgatattttctgtgttgcacaagatgcattagaaattccaagaggtacaattagagcaactgttttaattgaaactttaccaatttcttatcaattagatgaagttttatatgctttaagagaacattcatcaggtttaaattgtggtagatgggattatatgttttcaacaattaaaagattaagaaatcaaaaagatcatattttacctgatagacaccaagttacaatgtcagttccatttatgactaattatgttaaacaattaattaaaacatgtcataaaagaggcgttcatgcaatgggtggtatggcagcttttattccaattaaaaatgatgaagaagcaaataatgttgcattaggtgcagttgcaaaggataaattaagagaagttttagcaggtcatgatggtacttggattgcacatccaggtttattgaaaactgctttaacaatttttgaagaacatatgccaacaccaaatcaattatttaaacaaacttttgatgaaataaatgaatcaatgttagttgatacaaatattgaaggtggtgaaattacaatgaaaggtttaaatgcaaatatttatattggattaaattatatggaatcatggttaagaggtttaggttgtgttccaattaatcatttaatggaagatgctgcaactgctgaagtttcaagattacaattatggtcatggtgtaaacatcaagttaaaatggatgatactaaagaaattattacacctgaatttgtttgtaaattaattgatgaagaagttgcaaagagtaattcaagagaaggtaataaatatgaaattgctgcaactgcattaaaggatgaattaaccggtaagaaaccacttgcagaatttttaactgatatcttatatccatatattgcaactcctggtgaggcaattgatttaaatactttaaagaaatgattattttaacgaaattttttatttatgattattattattatatttatgatgatgttttttttccatttattatatagcaaagatttatacatattatagctaagtttatcgatttttacaaacctttcagagattttatatctttcagaagagaatccatacatttaatcatacttttttgatcaaaaatatttaattttaatgatttatcaataattattgcattaccattattttttgcatgtaaaattgaatgaattttattgaaaaatactgaaatataatcacgtataaaagttatatttgattttaaacttgaaaaattaatatttaaagttataagtatatttttcaaaatattttgaatttcaaataatttcagattatcaattttattcaattctaatgtaatatatttttcaccaaaattatcaattgttatattattatcttcagaattaataccaattgtattaatttgtaaattattaaaagaatttgataattcatcaaatttattattaatattattattttcaagtcttaaattatccctttcaatttgtaaagtatttaatttttcatttaataatgattcctttgtatttgattcaataactaattttgaattttcagtttttaaagtttcaatttcatcagataatgttgaaatagtttcagttttcttattagattcaacttcataattttcaacaaattttttaagtttttcattctcttcatttgattgggagagtttatgggtatattcattaattaaatctttattcatttcttcaaattttttcaattgtgaagattgtgaattaagagttgttgataaatcaatattttccttccttacagatattaactctttttcaagtgcaataattttctcttttaaatttaatttatctattttaagtacttcactatcatgtttaaacctcgtaacatcatttgttaaattattgatttgaattaattttttatcaatttcaagttccttattagtaagttcagattccaatttatgtgtatcagtttcctctactttagtattattgatgacaggaatattgttattattaccaataattttttcctttgattgatgtctatttttgagtattctatgtcttccattactttccatgagagggatctttttaataattgaagcatctgaaacatcaccatcaccatctaaaatttttgattttttaaaatttttagaattcaaatcaatatttgggaaatcaaaatcatcatggtatttagtatgacggatactatccattattaaaggtatagttatatatttaaagaaaagctataaaaaagagggttgttaattgatctactaaggaaaaaaaggtaaacatgaaagaatattcagatttgagtaaataaaattaaattaattagtcgcttataaataatgtgaatataatataaagtaaattaaataaccttagcctttggattcccttagtagattattagtgtgtgtatctctgagatatgattatctttcgatgttctataagggacttctcaacaaagctcttcaccagctgtgtcaacaacatggcggatcatggtatatttatacacaatttcttcagaagtttcattccttacttgcatttcttttctttttctaattccgcatatatccgcttgcctacaagttattcccgcaattcatacctgacttaacggtcgtcgttttctgcttcagtacaaattcgttgatctggaacgtttatcgaagcattcggattagtaatcaacagaaatataatccctcgatccggcataaaaagtacattagtcatacatgctgcagtgtagtcatgtttcacataaagtccgtggagcatatggaataaaaagaaacgtgaacactagtgcaactctcacagaatactcattaccgatgaattgcgaatcgcaacatttgtcaattccaagatttccatgtagcgagttatttcctcaatttcgacgaaaaactgaattcatattacctaatcttaacacaccaccaaatgctgtaaggattggaacattgccagaaagaaatactgtaattaaaataacaaaattaaattcaaatataaattcaaatataaaaatcatgcaaactaaaattcgcgtataaaacaaagaaataaaataaaataaaataaaataataacagtttcaatcaggttaaacaataatcattcttcatcctcttaataatcagcacatatgatagtgatcgatctcggtaaatttgaaatcaataataaattaattgctcttaaacttacttggtttcaacaaaatatcagtaatcagtaattccgtgcagagtcacggatacattcgttaagttgcataaaactctagatgtgtctcactttagatggtccgacaaccatgatttttggtaagatagtattcattacttctgcagtgacaggcttagttaaaatatcggctaacatctcctttgtaccaatatgtttatatatgatatgttcattctccatgatatctctcgcacgggccaccctaatacccatgtgcttagatctattactggtagtacccttttgcgccaagtatatagcagctgtgttatcaaccataaccaataatggtcgaagacggcggtattcgttcatattgacggcaccacccacttttgtagctctagtatactctgggataaaatattcttctcttctggagtattcaggaccaagtactcctagaaatgttaaaacttcacggtagtgggttaatccgttaccactttctaccatcgccgccacctcggcatccgttgatgaagttgccatgaatttagctactctagtaaaccatgcaactggacctccattcatcatgaacacagcggataaagtcgatttcctcgataccggatctcccgcatgatcagcgtcggagtaggtgatcattctatccgtatcctgagtcaaatctgatagatatcgagtatacctaatcatatacttacgagtctgatacaaatacctaacaattctaagcaattccctttttagctttggatgtggacataagcagtatctcgacatatagttggcagcataagtaatatccggtctaaccgttagtgctatgtactgtaatgctccaacaacttctctaaagaaatggatttcgtcagctaaatctttaccagataattccattggttcttccttttctagatcaaaatgaaaaccaggtgtcattggtgtagaaatgaacctttgagaatcaaactcttccttcattcctagattttccaccaatttagtgatataactctccagacttaattccatcgagagtaaagtaccactcctcttgtccctgttttctctgactccaataccaagaatatctttgaaacctaatttattagcatatgtcttccttaaagtaaacctattgtttatcttatatagaaaattatcaacctcattttgagatgtccctgaaacaatcatgtcatcgacgaaaaatcccacgatgatggatatcttatcttttcttttcttttggggtttgacgagaacacaaggaatatccccacgttcttcaaaacctattgatatcaaaaacttaactaaagttttataccataagaatcctgattgtttcagtccatatactgctttccttactcgatgcaccaccttttcaccatggtttaatttaactttactttcttccaggtgtttaggtagctcgacgtatacttcgcagtcaatctctgcgttcaaataggctgttgatatatctaccatttctatgtatctattgctttgtaccgactccgctataatcattcttagcatgtcataaggtaaggttggactgtaagtttctttataggtagacttatcctgtttatcacctctcataacaaatctcactttcttcttagcttctccccccatatctgccggtctcttttcagagcacactatctgcatactcacagttctctgtagtatataagggtcactagttataataggttctacatcccaagagtgttttgtcatttgagattctaattcgtcatcgtgcgctgctctccaggcaggtccttcaactggatcatgacaaacaacttggtatatgattcgatttgggcccgggtcttcccttggtgacttgctgatattggcaacgatcatgattccgttgacggacttcattgaaaacctactacggagtaatcttccttcaggtagtctcatggtttcatgcggattgtccgtaccacgcaaagtcctgtcgacctcatattccacaagattgttttcattcaattcaagcgtcttatgtaaatcatcctctctgaaggattgttcgaactcttctttgcgcattaaatcttcggtggtaatttcttctacttcaatgtcatcaaccttttctgttgactcttcattggctagtgatgtagtggagtcttcctgatcattaagttcagttctgccagacatttcgttggatatatcatcatcaatgatagtctcgtcagacttattcctggtaggttcttctgcaacatttccaatatgggtagtgtcttgagtttgttcttcattattactttcttcaatattgttgtcatccttaactatggtttcttcaacaatttcgacagtatctttctcttctgtcgtttctacgtcttcattattagtcgtgtttttctttttactattatcattgatatcagtagtaacactatctccccccatattcaatggaatgtctgcttccctaactgtaacttcctttggtaccatatgatctttgtttcctaccacgacacactcactgtccttgggtgtacttaattctgggtttatcttatttgtttcataaacatagtattttggtaacactggaaaatcaatttcctctttgcctaattctgcctctgctatagttttgccatacttatcggtgaagtctacttcagtatcattaactgcagctctcttcataccgaaattttctaatggaatatccttaaataatctaacaggtttattatacttcacatttcttgtgtgttttatggtagcatggtataaaccatctttaagtttctcatagactagaatcttgtcaccacctaagacgggtgcctcatctgcgcatggatactctgacggaccaagatagaaacaatgatgcgcacgcatctctagtcccgatactttcttagaagcatccagccagattccatatctaccaaaacttttaaacacatgtgggataaactgctttctacctgtaccagggaaataatgttccattatcatttgttcaggagatttatccttattcttaggaatcaacttatttctaatcattgaggagtattccattacgtctggccagaatctattatctatacctgattctaccaaattggttctcatgtcgtttctaatggttctattaaatctttctgctaaaccattctccatggatgcataaccgttagttgtaatgtgagtaataccgttgcttctatagtattctttcagactattactttggtattctctccccatatcagtgtggaagtaggaaatgtccgccttaaacttattctttatatatgcacaatatttgcggaatgaaggttcaacttcagacttatcttttaagtaaaaacaaacattaaactttgtataattacacaagtaagtgactatataacgtaacgctgaacctgccacacttccaccttttggatacttgaaacttaaaacaagtagatcactatgaactaaataaaagggagtctcaatcatatacttatctcttgaacctttaacgtggttacatctagtagcttttgccattgcacatgatatacatgtgaatttctcatttagaattctttcatctttatctaatactatattattattatccaggcttttcttaatggtgtcagtatctgcatgaccacctgcctcatgtattcctgcgactacctccttccgtttttgatgcttaagtaataagccatctggaatcataggggtgccttgaacacgatataactgagccttgccatcttgccaaatcaaatttggttctccatcaattgatctataatcaactttaaatttgatcaaatccttctcactaacataagtacctttaatatttggacaatatatcattgggacactgataaccttcttgataccatcattaattaatcctaaattcaaataaccaccaccttcaattaacaattcatctccagtaacagattgtactgtatgagaaccacctttaatttcctcataattatctaatattgttttatctcctgtaacagagatctgagcacctgtatccaaaacaatagaagtgtagttagattcagccgtgatgcctcgcaacctcgaggtctttatcattgatgttggactccttctctgccatcatgatctcgagaatagatctagcttcttcatcatttaaaatagcattgaccttaaatttctttctttcattactaatgataggacatctgttcataaaatgatttgaatcaccacacttccaacaaccaatatcatgtcttctatcacagtctcttggatcatgatttgcaccacaaatgacacaatgtcttgggtttcttcttcttctaacatttctacctccattgttaccataaccgttatcatttgagttgctgttagctgagtaattgttattattattcatgtggttgttcattgcattgttattaccaccattggatctcatctgtgatcttctaccgttgcttcttgcattagatctacctgaagatcttctaccatcatttctaaaattgtttgttctgttttgattagcattgaagataccgttggtattagctctaccattttcattaccattaccgttgccgttaatcattgtattaccattgaccttcttcttagtaatttctctcaagacattttcctttgatctaatgttagttaatgacttgagtttgttgtaaacagcatcgataagtaaaggaatatcattctcttccttattgataaattcttcgatgatctctaaaatatccttacaatgataatctaaatcaaaattgactgctaagtgagcgcaaatttgtttatttggcatttcgtatttagacaatttcatgattaatgctaattcttcccattgattgagtgtttggaatctatcgttggataagttgaatctataatctctgattcttaacatgcattcttgaatatctaaaactagaccacaagcagttaatatttcatgcaacatggtttgtgcatgatcattagtgttcttaccgaattcaccaattttaactgttttagaaaataattgcttgatgaccgattcttgatctttctcaatgactaatctgtgaccgagcatagttgcatccaccatcttgttcaaaatgttgttaaaaccaattctggaacagttgttgttgatatcgaaccaccatctattgaaatcttctttagagttaagagtttcaaaggattgattggttttaagaaattccttaaagactttgctgacttctgatgattctggtttgctccagtgtttttcacgatcatcaatgaccattttaccatctttgtatctgataggagtcttgagtttaattggttgagccttaggaatctttcctaatttattaagggttctcttcaaagatttggatttggtcttctttaaaggtgcagaatcctcgataataataggatcatcaattgatgatgatgatggtgatgatgatgatgatgatgatgatgatgatgatgatgcaacttcgtcattagtggttgaagctaaagtagttggtgatttagcttctgatgaagttgttgaagccgttgctgatgatgtagcttctggtgaagcagttgatgaagatgctgatggtgttgcttctgatgaagcggttgatgtagttgcttctgatgaagcatttgaagtaggtgcttctgatgaagcagttggagttgttgcttgagaatctaattgaacttggtcattgtttccattagcgacatttgcattgatgttattggtagtattaccttcattgttgttgttgttgttattctctgagttgttgagcaccatattcagatttgagtaaataaaattaaattaattagtcgcttataaataatgtgaatataatataaagtaaattaaataaccttagcctttggattcccttagtagattattagtgtgtgtatctctgagatatgattatctttcgatgttctataagggacttctcaacaaagctcttcaccagctgtgtcaacaacatggcggatcatggtatatttatacacaatttcttcagaagtttcattccttacttgcatttcttttctttttctaattccgcatatatccgcttgcctacaagttattcccgcaattcatacctgacttaacggtcgtcgttttctgcttcagtacaaattcgttgatctggaacgtttatcgaagcattcggattagtaatcaacagaaatataatccctcgatccggcataaaaagtacattagtcatacatgctgcagtgtagtcatgtttcacataaagtccgtggagcatatggaataaaaagaaacgtgaacactagtgcaactctcacagaatactcattaccgatgaattgcgaatcgcaacatttgtcaattccaagatttccatgtagcgagttatttcctcaatttcgacgaaaaactgaattcatattacctaatcttaacaaagaaaaacacgttaagaaacgaggcggcgcagtttttcgttttcttcaagcaaaagtgaaatttcaacaactgccatgttcagtacaactgctttctttgttgaattagatgctttagatcgtgatgatagacgtcgtttctgttgtcttctggttaatggttcttcggatatttgctgctgatgttgttgtagttgttgggtttcctcttcaaggttgaaattagaattatttagtagttcttgtaagtcattgaaggctgattttattgcatttctacgaagtctctcagtttcattatgtaaagctctcttagctgcagtatctatatgggattctttactctgtttactctcttgttcttgttccttctttggtttagtttgatgtcgtttttgtttttgtttttgtttagagattttttgctttttcaaaggtggctcagtcggtattaatttttgttctaatggggattgttgtggcggtggcggtgctgtgggcggcggtggtggtggttgatctgaagttattgggtaatcaattatagagtcaagaaatgattctaatgccattgattcacttgtagttaataagggattatttatatttatattgatattattattattattattatcatttaaataattatcatcatgatgaatatcatttaatggtattgaactaaatggtggagtgaatgataaatttggtaataaacctggagaaagagcatcatttgtaaaattttggaaattatttgattgatttaaacctggtgataaaagtaaatgtcctatagcatcgaaatcaaagtccattgtgatgatataagatactaagcttaatgttttagaatagaagatatacagtataggttatttaagtaataagaaggggataataatttattttaattaatttttattggagcacatgcgcatgtgaaaatttgcatttaatttatttattataaactgatctttaaattttaaaaataagacatgacattataaataaacattaagttacctttatttttggaaaaaaatacttataataatattacattaacattaaactatatataaagaatataattatttaaattctatttgcaagtacaaattttgataaacgattttctaaaatttttgaatcactttcattaataacacctgcactttgaagtaattcagaagctgcaattatatctttatcccaattaatacttgtaacattatgactaaatttaacttgacttaaccaagcttcaacatcttctctactattataatctaattcttttaaaatataatcaattgatctattttcatctttttcaaattctttaataccttctaaagttgctaattgaaatgatttaacaatttcattattaatttgatttgaagtacaaataacaaatggtgaccaaggagtataaactgaacctaattctttaatttcaccacttgtccaatattttttacttgtataatattcccacataaatgcatcactttcaccattattaacactttctcttaaatttgagaaattatgtttaacaatatattcaaatgaatgagggaaattttcttgtaatcccattataaatgacataacatatgaaccactaccaattcttgaaacaccaattttattattaccaaatttttttaaatcttcaatattatttaaatcatttctattaataccagttgaaactgcccaacgtaaaggagaaataacatattcaccaactatattataattttcatcaccattacaaataccacgtacaaaggcttcagttaaaccaactacaatatcaatttcattttttttcaatgaagttatcatatgacctgaacctgaaggataaggtattaattcaatatttttcaaaccaaaattattataatgaccaaatttatcagcgaataaaattggagcactataatgttcaggtatataaccaacacgtagttttttcaatcctagtgtagtaagtgtactcattttacgtaacattctataataattatattaatagttgtatggttatggaatggtataagtgaatgtgtgtatgaataatagattaccaagaggtaaaaaagacaaagaaaaaggaaaggaaaacaagccacaaatccaaattcaaaatcaaaatcaaaatcaaaatcaaaataggcctacataacgttgaaaatataagcaatgatcattattattatgatagtggagaggaagtttatttaatgccgagggaaaattaatgggaaaattaatgggaagtggtgggatggattaatcggagttaaaaatggtattacgtaatatacatatagagatgagccacctcttttttttatttttgattatgtaataatgataataataataataataataatcctaagtataatacgtcgtaacgctcgaaaacgtgattttctaaatttttttcttatttgttagacctccacatagactcacgttagacatgtagatagagaattgtctgaatcaaacatctgtgttgttagtttgttaaaatattgaaaattgattgagttatgaacgttcaaagtttacaccatacaaaatttcaatcaatttccgtgggagatctacaatacttgagtacttttaaatagtatcattggaaagagggaagtctctatatatagaaaagatactcgatatgttttaaaagtgttgtttaacatcatttattaacattactaattttgaccatttttcgtgtttttttgaacaatttttcagtaaatttactatgggaagtaaaaattctttttacatttatttaataactagatcgaaatcgaaaaatcggcttgcgggaagttttaatttgaacttttctctttttaatgaatgtattggtatctcatcaatgttactgatggtttcaaactagttgtaaatagatttgaatagaatatacactgtatgcttacctaataattatacaaatcttacgtaatccacgtattatacttaggaaaaattatttcccccatagggggtaatattttcgtattacaatacgcttactttaataataataatattagatatcgtttataaagataaacctttaaatacacagatcctatcttcttttataaatacatggctttaataaccatttaccctctgccttatctcctctaacagcttctatactagcatgactcttacttgttattggcttataaaattcaaatcttgtaaacatcttattcttatcatccattacttttaatttaaatccaagactttcaattgccttaataaattcactactttttgaatcacttaatctactcttaatttctgtaatccataaatctcctcctttaactaatattctattagcttcttcaatgaaatcaaggaaatttgtacccattaaacttaaacaaaatataacaacactacatgattcatcatttaatggcacattcttaatatctgcaactgtaataaattcattaatcttctttaaatcaaaactatgaacttcacatttaaatttcttaactttactcataatatctttaccatttccatatttctttttaaataattttaatgtatcctttgatgatttactattattaaattttttagaaaatttattaatttctttagctaaatttgcttcaccacatcccatatctgcaacaacaattcttttatcatctttatcccaatctccttctccactacgaaatcctcctggtgcattaatatttttagtaatacccctataaacaatttctctaatcattatatcaacaggattttcaggccaattctcaacttgtgatgcaaatcctgtatgatattcttcatataattctggttgtttactaatcatttctaatgctttatctgatgttgttgtatataattgttcattaatccatctaaatcttgaaccatttaatttatttaacattttacgttgtaatggtgttaatgaacttgatgcaataagtggtggtggggcttcactttgtataacttctttatctttacaatcttcttcagaatcttctttggtttctttgtcttccttattattatccttctttcccaatttcttatctttcttacccttctttatattttcatcattttcaatcttttcttgaagtttcttctcctttctttcctcaatttctttatcacgtttaatattcttagctttcttagttttttgaactttcactttacgatcttcaagaccccatccatcaacatcaaataacattgtatgtcactataccttaatttagtttatgaatctgatctgataaaaaaaaatttttattcatcaagtgaaatttataaatttttttttcgacatgtgaaaattcataatcgctaatgattatcaaaactcaaattactttctttaaacataaaaaactatgaaattctactgtaatatataaatttacattttatttattaattaatcctcccaactcccaactaaactattcaaaacctttcttgttttcaatttcaccaaatcttttaccatcaaccggtaaaattggtgatgtaatattattaaaagaatcaaatccactaaatctactaccatttaaattacctacactactaccacctgcacttgcattaacactagtacctgcactattactatttgaaaatccagttgagttcaaattatcattcataacactaaatggtgaaatatttaaattactcataaatccatcatctgtattaaatttattatttatttgatttaatccacttacaccatttaatccattaagtgcattaagtccatttaatccacctagcccacctaaaccatttaatccatttaatccacctaaactattcaaaccatttaatccatttaaattcattgaattaattgtattattaatgaatccattattatttatttcattattattaaatccattattaatattttgattacctgtattatttaatgataatccaccaattctattaactaaatcaaaatcaagtgatgaataaacattaggtgtagaaattgttgatgaattagttccaatattattattagtattggttgtatttgtgttaaactgtggtaatgaattagatcttgtattgaaattgttttcaagaatatgtaaattatgtggattgtttaaaacattattattacctttattatatccattagcgttgttgttattattgttataattcataccattattattgttataattcatttgattgttcgttgaatgatgtgttgtattgctgtaattattattaccattattattattgttattattgaaattgttataattattattattgttattattactattattattattaccatcatcatttttattatgaatataattatgatgttgattatgtggatgaccattcataattgcattttgacttcttggtgcaccacatttgagacaacaaagatttttagcaaaattatgatatgcacaattatcattgatacatttccaatcacctgcacgaaatggtacattagatgattgtctactactatacccactattattaccattatttccattatttccattactgttcccattattattattgttataataatgattactattattattattattataattattcttattgtaaccattattattataatttgtataaccgttattgtacccattattgtacccattgatattaaaattatttatatcagtattattattatattgcttatagtcattagatttcatcatataattattactattgttgttattgttgttggtaatattaagattgacattactattattattggtattattattgtaactattggtattattacctgaactattattacgtgatttatagttcattgaattaattgtacttgatgaaccattattataagttgaattacctgaaattgattcttgaacagcaacagctgaagcagcaggaaatgaacatctaaaacaagcagttcttctttgaaaattagagaatccacatgatgggcaagaccagtcaccaggtcttggtttattttttgatgatgggaattgacctaaaatttcttgtgctttctctaaaacttttgttgatgaaggttcaatttcaatcatattttcattaagaatttcaccattcattgttagtgattcaactgcatcttcatgtgattggaaaattgcaaatcctgaacatttctttggtgttgtattattattgaattcattttgtaaaatcattaaatgattatataatattggatttttcaatattgaaaatgtaattgattttgcattaattttttgaaaccaaaattctaaatctgattgagttatatctgatggtaaattagttaaatatacaactcttgatttttcaatgaagaaataacttaaatccatattcatatcatgaggtttggtgaaaacttgttttgatttatcattctctctaacactcttaataataaccaatatatcagataagttatcatcattaaattttaaatcatcattagtttctttattgtttttgacaatattcaatttttccttcattaatgatagatctaataaattatatttgatagaattaaattttgaaaaaccattcaattcctcatatttgataaattcctttttcaaatcaaaatatgttggatattcaagataattaggcaattgtgctttgatattctttgaatgttttataaattttacacgaaaatcccaacatttaacggaaacaaaataaaatggaatttcctttaagatacaatttgaatgaattgaatcagttaaaatttgaataaattgttgaaatttagagtctaatttattatctttattatcaatcaaatcgattgcttgtttatcataaacttcataagttgttgaattgataatcataaatgaagcttttgtgaattctatgatattcatattattttcatcctttgatgaaaaatctaaaagaacataattagaagatgttggtactgaaacgttattaaagtctgtgacagtattagtatgagaattattcatatttgttagtagattcactgaaccgttatttaatgggaatgtcgaaagttcaccaggaactgttggaataatacttgacattatatactattaattttttattatattttttttattatttgttacctgaaatttaccacccagttttgtttattaaaatcctttatttttttctttatatactaatacaatcaaaccaaaattatactttaatattgatagtttactttcccttgaaaataacctttattgaacgaaaaaaaaaaatcgaaaaaccctgtgtatgtatagaattttgtaccaatacccgacacacactgaaatatactatactagatagaaaaaaaacaaatgcaataaaatagaatgaatcaaagagatagacccagttctattatataatagatataattgcaagaaatactaatacaaatacagatacaaaaaatccagataaagataaagacatacagatcaaaataccattgataaccttagttactcactttccagtgaatttcgccaaaaaataatttttttcaacgacttttcatttgacgtggaaaataaaatgtttaatttgagaatagagggcacgacagggaatttgttgtggtgggaaaagacgtacatgattattgtttcagataagttgatattgatgttgattgtttggttttttcataatttatttcatttgtttcttctctgcaagtgtagtctgtattagttatcagttatagttagtttgtttgttattggaaagatatgttagataataactcacaacaatcgatactgacattgattcgtaatgtgacatcaagctcaaatgaggtaataataaactatttgcagaattctgatgataataatgatcaacctccattatttgatcctagaagacagacacaaactcttttcaaagttcaattatacgtttgttcaatccttggattgttttgctttctgttgttttgctatgtcagatctaaattccctttattttatagtataaggagttataaaaataataagattagaaaattacctaaaaatatgtttagttgggttagaatattaatatcaatcaataatgaccaattgttacaagttgtcggtttagaatcctatgttttcttatgctttttcagaatgtcaattagaatctttttttcattaagtattttaggtctatgtatattaagtccaatacgatattttatgacaggctcatttgatagggataattcaacaataaattcaatatcaaaatttttattttcaatatcaacaggtgatggtaataatgatgatccaaatgatgaaaattcagaacctgcattataccttgcaatatcagtattcttcacctatgttttctctgctattgtattttattttttatttagagaaactaatcatattattaagacacgtcaaaaatttctaggttctcaaagatctttaactgatagaaccattgtgatcaaaaatataccaaaaaatatgagaaatgaagaagaattgaagtttcacattcaagatttaaacctaggtaaagtcgatcaaataaactttgtttatgattacactccgttggttaaaatgttaaataaaagagtagaattagtaaatcaattggaaatgatgtattctaaaagttgtgggttagatacttgctttaatcatactgatgaacaaagagtaaatttgaaatacattgaaacagataccccacccacaaaggagttaattttatataatcaaagagaattgaagacacattcatctgctgaatctaccccatcaaatgataaattttatgttttagctacattaaatgataagactttcaataaacagaagagatcatgtatgaaaacaaataaatctaaaaaggaacaaattgataagctatcacgtaaattgatcaaacttacagatgaaataaatcatataaaacaaacatacatttttaaaagactgccagtagcttttattagtatggattcagtaacggatgctcaaatggctgcacaagcagttttctctccaaaggtttttgaattggtcacagaattagcacctgcacctcatgatgttatttgggataatcttattattgataataaaacattgttccttcgaaaaaatattattgaattaatcattatcttattcagttgcttattgattattcccacaagatacattacatcattattgaatgttaatgctattactaaaatgtggaaagaattaggtgattatttaatgaaacatgataaagctagaacaatagtgacaggtttgttacctacctatttattctctatcattaatgctgttttaccctacgttatttcatcattatccaatttccaaggtttaggatcaatgggtgatgttgaactttcagttataaagaaaaatttcctgtacatttttttcaatcttttccttgttttcacattatttggtacactttcaagttataaagcactattaactgatacaacaaaaattgctccacttttagcaacttcaataaaatcattatctttgttttatattgatttgattattttacaaggtttcacgatgttccccttcaagttattgcaaataggtgatctttcacttttgttttggaggttaattgtcaactattctaaaagaactccaagagtttttagagaaactttctatagaccaccattatttgatttaggtcttatactaccgcaacacatgttgatttttatcattacaatcttatattcttcgatatctaccaaaattttaatttcgggtttagtttatttcatattgggattttatacatacaaatatcaacttgtttattcattagttcatccttatcatagtactggtaaatcatggccaattatttttaaaagagtttgtctaggtgtctttattttacatttacaaatgtttggatctttggcattagaacagtcattcgtattagctggttttatgttacctctttttccaacaactttggttgctttaatgttttttgatagacattatcagccacttttacattatattgcgcttgatgcgatcaaaacttgtggtagaagtgttgaatctgaatcaactgataacgcacttgatgaattatttacaagtatgtctccatctaaaaatgttgcaaggaaaaatagtattaaaagcattgacagattgttggatggttatgaaaactctgatgctgttatactgagtaatccaaatgaacattctaatattttccttgatgaaaatgtcatagacgaaggtagaacctcaaatggagttcactcagatgctccagattcaattgatggatcacatttaccagcttataatatgtctgctacttctagaattactattaataattcaaacatgcgccgaagatgtagtactattgaagaggaaagagaagctacacaaagttatgttcatccatgtttacttgataactacgaaggtttattgataggttgggaaaatgataaacttgattacttaagactgaaaattgtaagtagtagaggaaatgaacaaggagttgacgatataaatacttcaaatcatggtgcaactatagaagagaataatgttgatatttacaatgatttagaaaatgaaattgaggggaatatggatcgtgtttctgaagatcttgaaaatgccaaaggtgatatatcaggatatgttaccagagttatagcaaatgaagaaatttggtaataattaatttttgagaaaacaaattttataatcagtttataaaggtaatatttagctttttatttcaaacgaatgtgtagttgttatgagagacacgggtaaaatagaaattacaacatgacaactccaacagaacttactttattattatctaagaattcattagtcttgctgtcaataccaccagaaatatgtgcagctttgtaattaaacaaataatagtgtaaaaatccatcaccagcaccgaatttaagatcatctaaaaagagtgtgttatcttgagatgataaagcattgaatacatcaatcttttgattctttgcttcaaccatagcatcattaactaaagactttaatcttttctttaataattcttgtgattcagcatcatttggagatttaccgataccagcttctgatgcataataatacagataagcaatacctaattctttatgttttggattttctaaaacgctgaatggaagaacataatatgaaataaaatcagtaattttattattttcatcttcaacaatgtatgcatgaataactttaccgtcttgattatcaccaccatatatccagtgtttaatatcttcgatagtcattatttgagtaatttcatatcttgatttccatgcgtcatataatttataaacatcttcaacatctttttcttccatttttctccagccagaagttttagtttgattacttatagtagttttagcaaccatacttgcctttgtttcacccattggtaaagaactaaagccacactcatataattttgtccaatttaatggtctgtggccgtatctacatgtacttaatggttttggtaaaactgttcctgaagtatataatgcttgccagatattatgtaaattgactcttcttgtaatttccttgattaataatggtgccaatcttttagatctaagttgtttatggacacataaaaagttgatttcaacacttttaatgtcattatttctgatagttaaatcacctggaacaccaccaataaatgcaactaatttacccgtttccttgacacggacacctaaatgccattctttcttccatcctggtggttttaatgcccaattaaaaaagtccttagaatatgcaaatctgaaaactgcatcatgatcttcaacatagtgatcataaagtaattcatgtaattgatctaaatcatgttcagattctaaatccagtagaacccattcaaatgatgaatgtattggatatggttcctttctaacatcatcaactgtttgaatagtaattggaccttccttttcaatctcttcatcaaatcttggaactggttgtgtcttccaaaatttatattcatccattgattttggaggttctgcaggagatggttctttctcatcaacgaccatttgcttaaacaaatcagctaaagatttctttgcttgttgttcctttgagttcccgtcactcatattatatggaatattaactgttgtgatatgatatttacagtttcgaaatcgaaagaatgctaagttaatggtcgtggtaatgttatgtaattttcatggagcaaattattattttctgattttcgattttgtgatataatttgaaataaaaggcgtctgtacttcttattgatgaaatctatattgatattaagagcattgggatattgtaggtaatacaatagcatgcataattttgaactatcaggaaatagtaccaagttcacattagttttcgatttattttcaatatctgacttatttgattccaacacagaaacatcaaatctctacattgacactttaattgataaaaaaattataaattctttaactgtatataatcaaagtaattggattacaaaagtttggaataataaagatattttcgttacaaaaaatttaaaggagttcaaaaataaacaattatcgttatctaagtggtcatcattgatttcatcaaagatacaaaattcgagtaaatcagctctactgggaggtgacttgaataaaagtaaaaaacatatagattacagattttcagcaattgaagtaacagctattgacgaaccattactatcaatgtcgataaaccataatttgagtaataatgccatgaacagtgataaattagcagctgaattgcttggagttggtgttataagaatattcaaagattccgatgatcacatcaattcttacaaaataagcacaaaagatatgaaacatgtttctggtgatgatagtacacttgcaattctagcagtcccgttttattttacggccagtgatatcttattaggatttttcaatgaagaagatgttaagaaattatcacatttaaggttaatcaaatctgttgaacctaataaattcatgcttttgttaaaattaagatctcccaatgatgttaagtcatttataaggaaataccaaggaagaaagtttaattcgtttgagcctgagacttgctcaattgtggaaattaaagaaattatattcagaccaaaagaaaccagtgaagttgatgatctaattaatgttgcattaccttacttacttgatgatccatttacaacagaaaaggcagaaaagaagggaaagtcaaaagaagttggtctgaatcgaatatacacagaacttgctacatgtccagtttgtcttgatcgcttagatagtaatatcagtgggcttttcacaattgcttgtcaacatacatttcatgctgattgtttatcgaaatggaaagatgattcatgtcccgtttgcagacatactaataaaagtacgcatgctttatctggtgatagtgtgaataccttagaaagtgacgaaaagtgtaaagactgtgaagctacagaaaatttatggatttgcttagtttgtggtaatgttggatgtggtagatatgaaaataagcacgctttaaaacattgggaaggaaactaatcattgcttttctatggaaataaacactcagcgagtttgggattacgctgaagatggatatgtccacagactcgttcaaaatgaagttgatggaaaaatcattgaacttcctttacgagatgaaggtaaaaagacaacagaggaaaagattgataaaattggtcttgaatactcaaaactgcttatatcgcaattggaaagtcagaaagaatattatgttgcaaaacttaaagaaggtactaacaaagtaaatactttgtataaatcatttgaaaaaatgtctgacagagtaactgcaatggagataagtgcacgggaatttgattctttgagggatgaaatgagaaaacaacaaaaggcatgtgtaaaattgcaagatgctatgtgtgatatgaaagcgttaaatactgccctaatttataaagttaaggtaatggatgctgaaaagaaaaagttagaaaatgaaaaggccgagttgcaagagcaagtaaaagatttaatgttctacttagagagtagggaaaagtttaaggatgcatctgatgaagtcaaagaaggacaaattttgatgacaccagctccagtacgaaaggaaacgaaaaagaaatcatcaaagggaaaaaaatgaataagctattttagcaagtaatatgcatggaatagattgggtatatataggtatgtaacgtattataatgatcattggcttgtatcatcatatgaaactatttcttgtataggaaaagtcagtaaaataaacggaatcttgtaaaattccatcattgtcaggcttttggattttaattactgatgagctactatttgatctactttcttcaatgtgatcataaataaatttggaaattggtgaatttggaggtgtgatatccaaggatgtgaactcgtgatcaaagttttctgccatttctggattacttattactggaactattggagggggctcaagctcatcattttgatcttgtaaatttttccaattaatgtatctgaaaaattgatgttccataatcttcttaaaaacttctggatcatctaaattaattcttttctccatatttttatttaagcatttattcaaaaaatctttagcaatttgtgacaaataaaatgggtaaacaactttttttgttaaaattttatccataattcttttgttattattacctgtaaatggtggttgaccagttaacatatcaaacatcacagcaccaagagaccaccaatcgcaacgagaatcatatgtttcacccttaataacttcaggtgcaatatattgagccgtaccatccattgaattacattcagttgaaactttacttagtccaaagtcggtcaacactaagtgaccgtgtctgtttaataaacaattttcgggttttaaatctctatagatgacacctgcattgatatgtaaatgtctcaatgctaatatcatttcagcaacataaaagcaagcaattttttcactcattattttttcttgacttaaatggaagaataattcaccaccttcaagatattccaagaataaataaaccttatcaaaatcttgaagtgcataaaacaatttaacaatatttggatgtgacactttttcaagaattgtacgttcagtaagtgtacgttcatagtttttagtattaacaatcattgtagcctttttcaattgcttttgagcatacaatttcccagtcttattatgtttgactaaaatgactttaccgaatgaacctttacctaaaactttgattggatgaaagtcagaaacaaccggttttgaagcccttaaaaaggactgattatcatttacgttaaaattagagttttgtctactttcaccatctgcttcaaaaacttcatcaaatttgacctcataagactcaccaacacgattatcgagatgacctactgaaataacactatttgacctatattttttgaaatatttaatatcttgattgttattcttattaacactatcattttcattttcattttcatcgcaaatatccagacgatcatcatcataatcatcgtttgtgacactaatcttcaaattagtactaatatttgagcatactgcatcttcatcgaatgcgaacaattgtgtcatttctcaaaggaacaactactttaaataaatttcaaagataaagaaatgtgatcaaccaaatgtgttaaacaggtgatccttacagtgaacctctactctataactcccaatgaaacagaacagttcctaaattaaaacattatgcatgcatgcatttcaacttatcaaatggcttttatggattttataacgtaagcaactctgtacaccttaaaattttattttaacttcatgaatggattatatagagctattaatggttaatataccgttaaagtatactatttgaaggtgatagggcatcatagaacacactacatattgatctaaatgtctgaaggatctgaaatttcttcaaaaccaaaaagactgtcgagtaaaagaaaaagactgggagttggacccaatattactccaaacactgttgcaaaatctcttcaaaatagtgaattcaaagatcctaaaaagtggcctccaaacttacacaatttcatcagtcgttcatttcgtgaagttagtaagaaaaagttaaatgctaatcaggtacaacaatttaaaaatcaattgaaaaatataataaatttagctatttcatctgataaactttttgtaaatgattgggataagcaagaattaccaattcttgctggggaaggatataagagaatttcgttatattgtgatgaagaagagattttgaaaacctctttaatgaatacatcaatcgatgatgaaactaaaacaaaaattaaagaacaaactgaggcacaactttatagaaataataataagaagagtaaaaatatttttggtgaagatgaaagtgatgagagtatgagtgatgggtatgaacctactgtatttccccaatcaaaaccaaaacaaaagcaattgagcttaaatgatactttaacacgaataaaaaagcaaaagaagccagcaaagaaagaatcacaattattgaaatcaccttcaccatatattccaccatcagcaagaaacaaattatcaacctccaacgtactttcctctaaaaatggttcatttgaagatgagcagaggaaggcaatgagaagcaaaagatttgagagggaattgtctacaccagttggtaatcgatattatgacgatgatacgatttcaacgggcccaattgttggactaaacactaatttagagaagaaatatttaagattaacatcgcagcctaaacctgaagctgttagacccttacatattttacgttcaaccctaaatttattgattagtcgatacttagagggtgcaacatataattatctctgtgatcaatgtaaatcattaaggcaagatttaacagttcaaaatataaaggatgatttcacaattatggcatatgaatttcattctaagatagctattgagaataatgattggggtgagtttaatcaatgtcaatcacaattatcaattttatatgaaactgagggattatcaaaacctaactgttatgaattcttatcatatagaatattgtattttcttttaacaagtaaatataacgaaatatatgaactgcaattgaatttaagtatgaatggggatgagcaatttaaagagaaccaatttatgaaatatgcatttggtatatttgaccaaatagaagaggggaattattttgaattatcacaaataataaataaactaatagaagataataaaactgcagagagagaactgatggagagtgcagatataaactctttagaaaatatacttaaattaaaacacaatccattttttttctttgttaattttgtcaaatcaataatggatagagaaaatattaagacattatcaattatctgtaagtcatatagacaaatttcactagaatatttggaaaatgtcttatgtatgacaagcaataatggtgaagaacattttgttggtgaattcgattcttttatacagcaacaccaattaggtgaatatttgaatgaaaataaaactttactggaatgccataaagcgagaatggtagttgatgcattaatgaggaaaacgtttagtaagattgatattaaaggacaagtatgattttaatctacttaatttagcatataaaaagggggttaaggaaggaagaagtgaacagaaaaataaagaaaggacagtattatagaaaaattttatttatactagtatagattggttaaagtttttctaactcatttgaaaaatacattatttgtgtaataaatttacccttataccttgtaatacaagagcttgtaatataaccatttttatttaagttacatgttattaaatgattaagcataacatgatgaggaatcaagcttctttcaattaaattaattttatcttgatgtttcaatttattagatccttcagcactattcattcttaataatttattcctaacaacgatattattctttgatttatttaacatacttgaagaacttgaagaatttgagcttgaagatcttttcaatataggtcttaaagtacttttattagcactgtatttatccataatatttaagtcatttattctatatcgataaatttcattaacatgaggtgtggttgattcttgatattgataaggataggttttataatttttagagcttgaatcatttagtaaatttgaatttaaataaaccggtaataatggtggtgaactaaaatgtaaatctttcaataaatcaaaatgattcatattcatgaattcttcatctgtataatctagaggtgatttattagggtaaactaatttagttgaatcataatagaatggaatttcactaacatattcaattttcttttgcctcataaacggagattctccccttttaatatctctaccaatactatcataatgtaaatcattcaaatgatcagttgaagaaataatgttatcggcattaacttgattatgattattaaaattgtgatcatgggctccttcatatataatcattccttcatcgtcaatatttgcatcttcatcataatcaaaatcatctaatatttcgtttaatggtaattcattataggtatgttcatcattaaattgatctgagaaaaaagttactgaagcatttctactgtgaaaaccactatcattaactttataaaaaggttgacatgtatctttatgaaacatttcatcgcttatattattgaattcttccattgaagattgtttatgagtgtaagatgattcatttgacattattttaggtcttttagtaaaatcaggtaattcaggtaatgagtaatcgtctttacggttaattttataatgacttgttatattatcgtagtctctcggttgttgactattttcaaatttattattaccaacataattatcaatatttttaaaattataccttcccttatcggaatcttcctcattgaagggctgtgaatgtgacatagcctcacctactttttgatgcacatagggtacagaatttccagacatgttgtaaagttgtatacgtatgttgcagttagatgataagaaaaaaatgatgaaaaataaatatagatgaactacatacctatcctaaatattgactttcaaccatataataataatccttaaatcaatagataaagcaacgataaccatcagaaaccggagaacggagcattaatcctctttgtttcaataatattacgtcatcgtcattttaattatgaggagaaaaaaaaagaaggtggctcaactttttgacggcttagctaatattttcataatattttcactttcttccattgaatgtgcctaaaagagtaactgctatgttttggatgcttttcctataggtatgaaacatttcaagtatgttaaaattggatagcaatagttttgacccttagaattatttaacaaggagaatctgctatatatttcatttttcatgtattcttttacaaagctacaatttaagaattcttttcttttaggtttgctatctctcctgaaggaataaaacaacaatgagagtacagtcattaataaatatacttgcttatatagcattaagtgaatcttcatatttgaaattaccaattataaaaaaaagatatgataatagcaatattcaaagtcattttaatgaacctcattatattataaaaaatgaaaatccctttgttaaaagagaacatcctgatgcagattttgaacttcatgctaaattcaatcagcttgcttataatgttgagttggaaattggttcaaataaagataaagtcaccttgttaattgatactgcttcatctgatatgtttgtcaatgatgtgaataatttaccttgtaaacaatacgaggaagaagaagggcctagtggtgatgaaaatgacggaagtgataatgatagtgcaatatatctaaagaaaagagatgtatctgagaaaagtttgtgtggtgcaattagctatccacaatttgactactcagcacaacaaattcctatagattatgattattacatgaatttaactcaaaacatagcagatccatctctctgttcaacatttggatattttagttcagaaaattctactacaatgaataaattagaaactccttttaatatagcatatggtgatgatagttctgctattggaactatgataactgataatgtttattataacggtatagaaatctcaaattttacctttggtttaaacactgatggtaatagagctggtccagttttaggtattggttacaaggataatcaaaattcttatcaaaatggttatgaccaatattcaagttttccatatcatttaaaagatcttggattaattaataaagttgcatattcattttatgcaccatatgattcatctaattcaaatgcacaattaacttttggtgcatatgataaaaatggttatttaccagaatctggattaacaaaagttccaattattaaatattctccaagaaataaaagaggttcaggtccatattatttatctattacattaaattcaatttcaattacaacacagtccaatgattataaaagtgaattaatagcaacaggtaatgcagctgcaattcttgatacaggtacaactgcaactgttttaccttattatatccttaatgaattattagttaaatataattttaaatggtcatcacaagttagttcatatatcatttcagaaaaagaaattccaaaagataaagcatttataacttttaatttccaaaatgcattaattaaagtaccaattattgattttacatatccaattttagatggtgaaactttatcaaatactggactacgttcaatttcaattagttcatttgataatgattattttttactcggtgatgatttcttaagtaatattttattttattgcagatttagaatcaaatgaattatcaattggacaagttaaccctcaaaaatcatcagagtctttagttatcattgaaagtgaaatcaatgatgcagttcagtcttcaaattgggatcaagtttatggttataatggtatcactaatttgaaattaaaaaatacttatactgttgatgatttaaaaacagctgacaatgtaactgaaaatattcaattatatgttgcaggtgcaggtgttgatttagggtggtagttcactttttatactcttttatgtaaaattctttgtgcacttatataactgttcaattattaaaaaaataaattacattactataatcgttgagagaattaatgtttgacaggttttaaagatatatattttttatacaatgttaagtaagaagtgaaataaacgtaatgaaataaaataatgatatggaacataatggtaatataaatgttcaaaatggtataaaaatggttttttcttgcaagtgtattgaattaatgcattatctatacatgtgataataattaatgagcagaagataaagttttagaatatggtgtaacggaaggagcatatgataatgaaaatgaagttttagtaatatcatttggattattaacagttgctaattttaattcagtaacatcattataaccataagtgtaattatatgaagcaacagaagtagcattagggaatgaagagacaactgcgacgatatcttcagaagctggttcaaaatttttaggagcaattgcaacttcgttatcttctaaatcaattgaaatgtataaatattgtaagattgaatcacctaatgtaaaagtatttggagttgcatctaaacctaaaacaactaaatctgaaacttcctcattatcaagattaaccagtgggaaagttaaatctaataatgaaactgaaacattaacaccttggaagttgaaaacaattgaatgattaacaagtttagtttcattaccaacaaatgcttctaatgattcagaataaacaaaaccagcctttgcgacaatttcatcataaatataataaggtaatgaaccaactgaagatgctgtatcaataattgcagctgataaacctgatgcaattaaactagaagtttcttcatcgtcttcattagtttcttcaaaataaattgatgataaagtaattgcaattgcagaagcatttctagtatcattataagcaattgggatttcaactaatggaagaactgataaattaccaataaattgttctaaatcaacaccaccaaataaaactgatgatccatttgataaataattatcataaattgaataaacagttttattaatgaaaccttgagattttaattgatataagaaattatcataagttgaaccatttgataaccaagttgattcagcatttttcaaaccaagacctaaaacaccgaatgaatcatcatctgattcagttactaaaccgaaagttaagtttgaaattaatgaatcaccataagcaacaaaatcttttgcccaagtaccatttacttgatatccatcataatctgaagattcaaaaggttcatctaaatcaataaaagattcggaatctgatgaattgaataacccccaattagaacagctttgactttcataatttaaaatttctaaattttcaattgggaaagttggatgtggataacttgataaccaattagttgaagctgaagcggattgtgaaggataaaattggatatcataagaatttgtagatctgacagtagttgtttcaacagatgttgttattgtttcagttgatacatgttcatcgacataataaacatcatcagcactattgtaataacttgagtaataagttgaaatccttggaccttgagaagatgaagatgcagaggatgaagatgatgaggtgatcgaggtcaattgaggtttagtataggtatatttaactgtgaagttattggatggagaaacatcaatttcatcaaaatcatcactatcatcatcattttcaatttcctttgtaccattagcacaaacggagttatcgattgaattaatccataaatcagaggaaacagtatccactaaaactgaaatattttgagcatttgaaccaattgctaaatcaactgcataataaattttatcattaaatatacctgcaactgtaccatttatatcagaagattcattaagattatttttataataagcatatattggatatttttcaatttcagcattttgagcccaagaaccttttaattttttagcgtcaaatttaagataattgacgtcattagctgatactaacgcaaagaaacaagcgatagttgagagaatcattgaacttgaagtcatttgtcaagagaatgaaatgaaatgaataaataaagaaacaattgaaattaaaaaaaggaaaccatggggttttttaaagagaattgagcctaaggcagaaaagttaaagggagagcaaccattattgaaataataataaaagacaacgtcattaatataaaattagagctaaatttagcaattttcaacgcactaagttttcctatttaggaaagtgtcaattatttcacacttgtgataggtttactctgattttgctctgtttgatctatggttagtattcacgttagaatgtatatctgtactcttataaaggatagtagtatccacaacggaatgttaaaatggaatacttcaatttttagtcttattaaccattaacaatctcaaaaaaatatatagcaatgtccttatcatacactaatatcacacttttttttgttttcttacattcaatactcgttaatgctcaattatctgattatatctctcataaagttattaacaatcaattacagatagatataagcacatctcttgcaccttggacatctttggatattgtacaaagtaataacaatctaaatttaaagtggaaatcaaaaaattcttcattctttacatgcacatcgtctaataaatgtaaaaaaattacaaatttcttagattttagtgatgacaatgatattgctgttgctttcgatgatgaaaatttcccaaattcttatcaatcagatttgaaaaaattaagatattcatctccagaattaatttcaagctctgataataattataatgcatcatttttagtgataataaaatatgataatttaacaattccaattaataatttattagaaattaataactatgttgaaagttctatgttatcttcacatactgtctatgaacaaatcgatgttcaattcatgtaatctgtatactatttatatataacgaatcctacctttctgaaaatatactactgataacagtgaaagttcccacccgccgcattttttattttattttattttgtggcgcatgtattttaatgtttacttcacgtaaaatctattgatgttgattttaacatggaaactgatgcttgtactccttcctgagcaatcaaataatgtcattcttagatgaaatgcatcaacatttagtatctatagatacaatgaaatttaaaacttcaagtattttcacaaattcattactcaaaactcatgatacaacacaaattatacgtgatattagagatgaagaaattgttttctttaaaggtaaaaaaatgcaatttattgattatgaattaatgaatagtttaggagttgcaaattcaaatgattatgtccaatatgaaattactaatttattagattcaattgataaacctgaaattgatgatggatcttcaacaccaaataataatttacaaaaaattgattttaataaatttttaatagataattcattgagtgaaattactaatgatgaacaattttatttagaatttaaggatgatatattagaactattcaaattttataaacattcatatactgttaaaaatatctgggcttcgaataataataataacatgttagactctgatacaaatgaattgttaaataatttaaataaaaaaatagatatgattataaatagtcttaaagaaatatgggaaattcatcaaaatgttaaattatttcaagaaaaaatagataattcatatgaaaaagacgtttaaataaaaaattaaactgaatttattctaattaatgttgataaaatatcatttaattttttcaatctatgaacaaaatctttaatatcattatcttcaattgcttctgctaaacctggtaattcttgtcccttataaccagtatatctaccacttgcataaacaatatgtttaaaccatgatctatcattcaatccttcatcatctaataaatgtctttcataaaaatgcaaaacagtattcataccttttgccttgaaatgtaatttaattctttggaaatatgataatgagtcccaatgcttatagagatcaactaattcctctaattttgcatcaaattccaaagattttaattgaagcgctgttaatttatctttaatttcattgattaaaatagtggaaatctcagtataagatttattacaataatgtttatggtgattttcatcgattgatttattataccaattatcaggaatttctaaattttcaaaataatcattaataccaattgaataatcatgagttcttaaattgagtattggatcagttgataaatgtaatattaataatgacatatatttagccattaaattatgataaataaattttggatcaccgaatttttccatccaataaaatgaatcatataaggaatgatattgataaactgatgaatttttcaaatcattgttaaaacccatatcaactgatggtatacctaaatgttctaaaaatactgtataatcagagcctgaacctaaggtaccaattgaacctgatttttcaataaaatgttcatacaatgatttttcggaatttggataatttaattcctttaaagttgataataaaatatcatttaataaaggtgatgcctttaaatctaaaatattaccaattgttgagacatcagtattaatataagcaacacattctttctttaatttttttgaatgatattcagcaaattcagttgaaccaatgagaccatattcttcaccatcccaacttgcgaaaataattgaaattcttggtttccaacctgattttgttaaactaccaaaagctctaataatttctaacattgttgaagaacctgaatgaggatcagcagctgctggagtccaagaatcatgatgattaccaataagtaaaaattttgaatcatcataaccttcaattttacccattatattatacattgttgaaatattgaaatcttgtttattaaataaattaatttcataatcaggatttggacctgttgaataatcaaaattttcaactaaaccattccaattatcaaatttatgaccataacctgaaattttttctaaaattggttgaatttctttaaatgaaacgggtaaagctggaatttttggaattgatttataaggacttgatcttgaatttgattcaccaggtttaattgcataaccaggagttgtaggatcaccaggattaattgaaaggaataaagctgaacctctttgaattgctgaaggatttctagcaaaacctttaggataaggtttaaaaccattttgaacaattacattaccatcatccattgtatcagtataaattaaaacaccaatcatttcattttcttgagcaaatttaatttttaaaccacgataaattttaccatatctaataattgcaattttaccctttaaatcaatacctaaattatttaatttttggaaatcttccattgtaccataattacaataaatatattgagaagttacattaccatttgctgcaaaacctaaaaatgcaggtacataaattttagaattttcatcttcatcaatttcatcttcaataagtgaagcattaaaaataatttcacttgtatttttattaattaattttaaaccattatccaatggataagacataaaggaagtatattcatcaatgaaaacatcttttaaacctaattgaataaatttttcaactgtataattaaccatttttaaatttgtaccggctaattgattatcccttgaataatctttaagccaatcaccagctaagttagtttctaaagaatttaatataagagattttgataaatcataatcatttgttgaataattgaagttgttagtattaattttggtaagattagtataaaagaatgggattgaaattaaaatccaagaaatgtataaatatttaacaattttcagtctaaaattacgtgaagaagttaattgtgattgtgattgagattgagattccaaatcattaacaataatacaatcatcataagaggaatctttttcatcaacaggagtattatcagtatacctgttagtcatgattgataatataaaagataaaataaagaaaaataaagaagaaataaaagcttattagtaattcacagtaataaattatactattctctctctctcttatcattaaccatccctatcatctgattaatgtcattcctctcggtgttatcctaataattttaattttaatttttattattattattattaatgttgagcctccctattagtctaatcgacgcatcgtctcttttatgaaagtgattacataatcctttactataattcacttacctaataaatacgtcactcattaggttatcttattacctaatagggcaagtagattacatcataatagtaacttattatttaatttgatggcttgttatttttgttattactcatttctatttatgctgatacagagggagtctattttccgaagtttttcattttcgtttctttttcatcatttcatgttcatttcttttgcactgggttgggtttttccatttagttttatttaaatacaagaccctttcttcttttttataattttccgttagtgttttgttttaactgttttattattaattcccttattattaacttcttttcgtaagtaagaataaacttagaaaaaaatgtcaactactagcgttcaaccattatctacacctgttgaagaaatcccattaaatattgaaagtcctcaagatattggatttgttttcgatattgatggtgttttacttaagggtaaaaagagaattgaagaagcaactgatattattaattatttatctgaaagaaaaattcctttcattttattaacaaatggtggtggtatgactgaaaagaaaagaattgatttcattaataaaactttacaattagataaatatccaattaatgaagatcaattaattcaagctcatactccaatgagaactttaattcctcatcataaaagagttttaatttgtggtggtccaaaggatgatgttagagaagttgctgaaaattatggttttgaagatgttattagaccaatcgatataattaaagcaaatccaacaatttggccttatcatatgttctctgatgaacaaattgaaaattggggtaaagatccttcaattactaaattagatgttgatatggttaattgtaaagaaaatttaccaattgattcaattttatgttttaatgattcaagagcaattggtgctgaattacaattaattttagatttattaaattctgaaaatggtgtcttaggtacaagaagaactgaaaaatcaagtaaaccaagtatacctattgttttctcaaacaatgatttcctttggtcaaatgaatataaacaaccaagatttgcaatgggtgcattaaaaattgcagttttaacaatttatgaaaaaattaatggtaaaaaattagagcaattaactttaggtaaacctgaaaaagtttgttatgattatgctcatcatattttaattgattggagaaatgttttattaggtaaaaaatctcctggtaatttatgtttaccaaaactgaatgatgctccagttaaatcaccattcaaaaaagtttatatggttggtgataatccagaaagtgatataactggtggtaataattataattggggtacaatcttagttaaaactggtgtttatcaagaaggtgatttcgaattaaatccagaaatttcacgtccaagtttaggggtttttgcaaatgttaaagaaggtgttatggctgcattaaaattaaatggtctggcttaattttatactttaatattactattgttactattactatcacttttcatattaaacttttctatattatctaaataaataaatttaaaaatcgttaattattctttcattgtataaataaaaaattacatatctaatcatttcctaaccttttcaattgattgcataactgcatcgtaaacatcattaaatacacctaatgttggctttgataaatttctatcaatttcaaaatctccatccttataaacaccagttttaactaatgcagtttcccaaccaaaattattaccacctgcaatatcactctttggattatcaccaaccattacaacattatcaaaatattcatttgaataagattgtaaaaatgttaactcactaccaattgattttaaattatttaatttcctccaataatcaattaatactttatcagcaaatgcataactctcaatttgtggtttaccataaacagtatcatttaattcattaccattattaagctccttatataattctctaattgcaattctaaatgcaccttgaccaaatcttggaattttataatttgcactccataataaatcattatttgagaaaattattggtatacttggtttattacttatataatctctttttgtaccaattaaaccatttttagaacaaagtaaatctaaaataatttgtaaatctgtacccatatctcttggatcattgaaaaccattattgcatcaattggttcattaatattaaatgaaattgaatatttatcaatttcttctttagaatatttaacgaatggccaaatatttggattttccttaactaaatcaattggacgtaaaacttttttaaacccataattaattgctgcatctcttgtaaatggatcaattccaccaattactaatacattattaaatttatttgttaaatatttcattggtgtatgagattgaactaattgatcaatttcaatattagtatttgataataagctatttaatgaatctaaacgtatcttttcagtatatcctccaccattagttaataaaataaatggaattttattagttttaagatattttaatgtttcaattgcttttggaattggagttttagaatgtaataaaactccatcaatatcaaatgcaaaagcaatcggagttttcggaattggagatttatgatttataaagttacaagttgtataaaatcttgtaaatgctcttgttagtttcattatgagttgttatttaaggaatattgtgtaaaagaaaaagaagatcagatcctaggaatttaaagttgatctgtcaatttgaatttcagataagcaaccatgagatgattacgtaagtttttatattaattctttttaattatgcttagtaaaaaaatacaattattactataataatataatactaggaaagatatctaagagagagagagagaggaaaaagaatgtatattaaataagcttattataattttaattatcaataaaataaactaaagaccaagcagaacctgcagctattgaaccaattaaaatcatttgtaaaccttctaaacatctagttgtctttgaacaatcttcacccattgatattaaacttttaaaataaccaaaccaaaataatgtaaataacattaataaaactgatgataataaagcttgattaacagtttttaaaaagaaataaggtattaaaggtataaatccaccaaagaaataacctgaaccaattgttaaagctgaagatacaattctaccctctggaggttcctctaaacctctaccaaatttaattataaaatcaatcatttgttgaggatcttttgataaatcattaataaaattttcagcagttaaatcagatgcacccatatcaattaaaatttcatataaatcatctgttatattatcttgattttgaaagaaaatttgtttctctttacgaacttgactaaagtaatattcattctctgattttgcagctaaataaccacctaaacccattgaaattgcaccagaaactaattctgccataccaccagttataactaaacttgtatcaccaagtgatgataaaccagcagttaatgcaaatggaactgttaaaccatcagataacccaataattaaatcactcattatacgaggatcaacagattttcaatatattaagtgggaatggagaatttaaattaattgaatcattatttgaagattttgaagatatttcatcaattgaagttgaatttgaaatattttgatcttgtaattgattttgtgattgattttgattttgtaattgtgatgattgtatattattttctatatcaggaggtaataaagccgttgattctgaaggtgaatcattgttcgtgatattattattattattattattgtcagtggtatttgaagtatttaaataagaagcattgagtactttttgaacaaccagtttaacaccaaccagagacattgttttgagatagcaaatagagtagagtttgtaaagtaaggttaagataaatgaagttaaaaaataaatcaaaataaatcaaaataaattaaaatcaaaataaaataaaaatacttaaaatatatagtataatctttaataacaacaagccctgcccatttccaaccagtgaaagggcgagaaaatgtaataattccactttcaataaataataacaacaataatactacggggtcgatgcgtcggtcggtcttttaaatttctttttattttcttaatttcttatcttgacagattagatcattacaattacaaatacaggataggatattattactatctccagataagtcacaggatggcaaattttgtatttaatatcatggcttttccctttttcttttaatctttctcttttattttgcttctttctttttcttctctataccactctctaatgaaagtacctattaaacactcagatattacatttttagcaactgttcctgataatgcttcagttaatgatttaattatttcaacttttttatctttaccaatggctgagcctcctgtggcaaatttattaattaattctccaaatgatattaacctttggtatggtggtaggaaaatggatcataatttacctttatctcattatggaatatacccttcctctttaaataatgaaaattttacaattcatttaacttcaattaataatattaattcaaatataccaatatcatcatcatcaacaacaacaacaacaacaacaacaacaacagttggtataccaactaataaatcaaaatcaactaaatcaactaaatcaaaatcaaaatcaaaatcaaagaaatgtttctttgatcattgtacttcaaatcaacttagaatggttggagattgtcaattttgtcaagggaaattttgttcaaaacatagattattagaaaatcataattgttcaggtttaaaaatttgtaaagataaatcttatgaacgtaatgcacttaaattacaatctgaacaagttgttacttcaaaagtttagtcattactataattattattacataccttttttttcacctctttttttaatccatattatatccttggggggactttttcattacaattacaatgatataatggatcatatttacattctttcaggcaaggtttctttttcttctaatttatacttatattcacaatcatattcatataacccttttattattattattattattactattattatcattacttatatactcttttataactctctaattctcatcttaatcttagtaacgttttctcatctcttatcatgtatctattatctactttctttttttcgaattttctttatttttttaaaaactataatattataaaactttttaataatttacactaggtaaaataattaataaactagaactgaaaactaaaaaacttaatttaatggtttctttgcaacatataacatcattggagtgaaaagtttttgtttaccaccttcaactaaataaattgctgcttcctctaatgcttcagtaactttaacagaatcttttggtgcaaatccaactttttctaatgcaccaactgttaatgttgtaatttttctaccagttgcacttgttctaaaatatgtccataaatcaccaattgtttgaacatatttccaatcaccagctaatggtgcataccaaggaatttcatcattattatcagctaaatctttttcataaacaatttcaaagccaacatttcttaatgctttatctgcaacttcctttttatacatttttggaataccaccaccaacttcaataccataagcaattcttctatgttcttcattattttcatcatattcatctgtcataacccattcataaacaccaaatgtaccacctggttttaaaactttataaatttcactataaacaccttctaaaacaggtgcatgaacagttgcttcaattgcataaactgcatcaaaagtttcagctgggaaatccatttgcataaaatctcccttaacaaaatttaatttatcacttaaaccattttgttttgccttataagttgctctctcaatttgataatcattattatttaaacctgtaactttacaacctgtaaatcttgaaatttcagttgctggaccaccaacaccacaaccaacatctaaaacatgcatattttcattaatattcatttttgatgctaaataatgttcatgtcttgcaattgcttgtctaaatggttcacctttaaagaatgtacaaaaatgaaatgatgaaccccaaccatattcataaaaatctgtaactaaattataataatgttttgttaatgatgaataatcttctaatcttgaaacttctgcatctttatcagttttaccatcccaatgtttaaaatatccttcaattgcaacacttgttgcttctttatcctttgctgtcaatgcacttaatccaccagtggaatttacttctttaccatgcattgctttagcaaattctttatctcttgtgaaatttttttcagcaagtttaatatctccggttgaactcattgtttaattatttattgtggtattaaaatagaggtgttgaatccttatcgaatgaaaagaagttaaaatataagaatattagaataatagaataaattaagaaaaagaagtaatttaagaaattaagaaaacgttctctttatactgttttgttaaatttcagaaaacacgtccattttttatcagattaaaataataataatggatagcgaaaaaaaagcggtacgagttatacgaattatattttttacaattttatgggatttatacgatataaacgatataaacgagcgcaacgaaatgaacgactatagaaattatcgtatcgtatagtatacgagattaaacccccagtttgtgctatatcaactccgattaattcacctctgataaagtacttagtctatgcatgggttatcttctaatattttaagataaggtttaggtttttagacagagatagagaggagttaaagcatcaatttttgaaagatcgtaataatatgaatacctattgtaaaaaaataaataatgcactgttttataaccttatagcaatgtctcctaatttaatttataataagttcaattcaacacagtcactcagtactttaatgttaaatgaaaagaaatataaaaaattaacgtcagctacaggattcgaacctgtgcgggcagagcccaaaagatttcaagtctttctccttaaccactcggacaaactgacacttgtgacgtataaaaaaatgtggtcctttcagtagttccattcttgcttacgtagaatcaccaatcaaaaccatgttgattataatgaattatttgaattacaaacaggaatgttgaattcccatttttatcacccttgccaattctgcgaaggggaaggtgggactcatcatgtctttttcaaatgtaaagaaattgaagtaattctaaaagaattagagataaaaattgatctaaagaatattgttggtttaatatcaacaaagaaagatgcttataaggcaaatataatgatcaagttaatcatattttttaacaaacaatgctacaaaagcaagaagaatgatccagagtttaggattacaaaaagatttattaaagatacatatttgttattcaaatatgaaaaatttagttcttattagacctaaattagaagaaaaaggttaaagaatgacctaatagaaataatttacattgagttcagtatatgaagatatattgaattgatgaagcatgaataatatatgcgtataagtaatcaatctgtataaaattgtatattttaatgaaattaatgttaaaaaaaaaaaaaacatattgtaaattgcaaaatttttgccttaaattttggaagaaacacatttaaaccagttaatatttagcatttaaaatttgatttgtaattaaaaagttatttttacatacatcatttcatttttttctaagtattcgtactgatattgttttattctaccattaaactaacaaaaatcgttataaatacctagagatatatcacaattacacataaatcaggtaaacctatcatttaaattcttttctttgaattccacaatccattgatttaaattaccttctaaataagcttcagaaatttgattaaatatcctatcatttattttaaatcccaattttgttaattcaagaacagattgtttaattttaccattaattgatccatcaccactattatacttattattcatgttctggttttggtattctttaactatctgctttgttattaatgcatcttcttttcttattcttatcaaaaatctagaattcttcattaataaatcttcaggatcggggattactttaatatcattatttttcgttataatcattgtattgtaatcttcaacttcacctagtatcaatcgatagtatggtaagttattagatgtttcttcaattaatgaaaacattccattttgtgttaatgtatgtgtaaaggaaagggtattttctgttggattatattcaatgtatttaccatcactgcttttaatagagaaaactttcttttgttttgatgaaccattgacaaatttagtggatgattgaaataatgtagatacatcattcaatatgaaaacgtatgaaacatcctttggttcaactctgtatcgtaagttttcaatatcaaaaacatcattatctgtatactctattatatttgatattagtgatttttcaaaatcttcactgaatatcaattcacttttatcttcatttgatttaatcgttttcaaacataacattttatcttccctttgatgagatatcattataggtaaatttcctgagctttcatccaaaattgaatgagatgcagcactaagatctctattatacattgttgtccatccattagtaactgtctctatattaatatcacaaagtttctgttgtttaccgttaattgggaaggatctatcattctttgactttattgattcatcatttttatgtacttttactatcttcttcttctctttctttttatcacctttgaatataagttttgataccattaccgatgatggtacccaaagtaaaaaaataacataaagaagtttcacataatcaaggatgataaaatattttactagcgattttaaatggttcactgattactagacaagctctatatacgattcgattataaataaataagacttaatcgatcattgatttaacaaacgttctatatcatcagataaactcaatggagtttttacacttgaatatcttttaaatactttaccatttttagtaactaaaaacttttcaaaattccatttaatccctttaaatcctaaaacaccaggtttttcaattttaatccattcatataacggtattgcatcaggtccattaacatttactttattcataattatcaaattaagtccaaattgttctttatatattttagcaatttcttcatcagttccaggttcattattagcaaactgattacatgggaaaactaatatctctaatccttgttgatggtatttattataaatttgttcaatttcctttatttgttctttaaatccacataaagatgctgtatttatgataagtataactttaccttcaaatgatgaagtgcttattacatctcctccattttgcactatatcaaatgaataaaattttgacatcggtactgaaattgattacaattgaaacattgagatctcttaaaaatgggtttattaattataaaagttcagagttaaatgttcgtaatacaatctattatatatccttttttatccagttggtctagaagtgtaatggcttaataattctaattaattatggtattcgcactcagtcttctctcatcagttcttacttttgatccagtccttaacaattctgacaaattcaagtttacgttccgtgactaaccaatgacctgcatctattggttcgacgctgtactgtggaaaatattttgatatagcatgagtgtgaatatcatttcctacaaattttgaataattagccttaataattaataaaggtggggtttcactttgatttgctaatggttctaaatcaccaaaattttccattctccattgtaatatatcttcaattgaattattcagtacctcaaatggtactttagctattaactttttatttttagatacgtacattagaaagccaaaaattaacaattatttcatttggttcaacccattttttcaaataatttttcagttcattcaatgaccattctggatgtgttttaatacaccaattcagagtttgtaaacctatatgaaatttttgaaattcaacaaatgaattttctggattggtatatggaatattatcaattgaaacgacacctttaatcgtctttggatatcttaaagcatgaatcattgcaactttagcacccattgaatgtcccaatataataaatccgtgatgtcttggaattgtagatggtagattctctataagtttcgatatatcatcagacatagtcttataattcattggtacagcatggaaagatgttccatggtttcttaaatctggtacaataaagtgtgtatttaattgatcagataataattttgcagctgatctgttgtttcttctattccccaataaaccgtgcagaaagataactggtggtaatgacgaattctcttttggtgaaaacaaatcatagtctagaacaccaggtacagaagtataagagtttatatgacgtatcccctggaaatttctagactgtatatttctaatacttatcttaaacatgtatcaatccccttgaacaatatataacttataataaaacttcaaccatcgatgaatattttctgaaacaagttgcaaaccaacatggaaatcttcccatagtaaaatttcccatcggtaaaacgcggaataaacggtttcttagaaagttgacatttccgagattttgctattttcttcagaaacacttttgctaccatcacttgtgtttcatttaagtcataggattggggagatatctgtatattgactggagatgatatctatttataaagagatgcttatcctctgcctttttgcaaatcataagttttattgaagaatccaccatcttgtaaaattttgagctttattttttctttggctaacttcccctttagaaacaaacatatagcaaataactaacaatgattttctcttgtggattatttatgataaaaaggacaccaaagcttctatgcacacttttaacaatagttaatattattatgatattttttgttatgaatggtgcaactcatgattcatctggttattcaagtttatacctctatgaatatcaatttaataatcaaagtgatatctcaaatttattggcaacacaatatagtcaacaacatgatggtaaaaaattatctgatttttcaatgaaagtcggatttatgggtatttgtgttgattttggtgatgatttagattgtggttatacaagtgatatgaaaactgattatgatgataaagttccatcattctctgttacaaataataaaaatacaacatctagtgcaactcttgaattattcacattagctgagactttacagaataaagcaactaaatatcaaatatttattgttgaaataataacacttcttgtactattagtggctcaactttataatatgattagctttttaccatttcaaatttatattcaatggtttattttatttgttttgacagtgttctttacaataatatgtatttcaatttcatgggtcatgatatcatgtgctaatgtaatgaatctaggatctgtgatgactatgaatattttatcatttgctcaagggaaaaaaccacaaagtgttttatgggcagcttttgcactttgtatcttgcaagttattttttacatatggacaataattaatggtgatttttctggtttcaatttaagcagaacaaaaaaaccatctaaagatatggaaaaagatatcagcagtattgatcatagtattttaagtagtatcagtactttaagaggtacgttatagacaaaaatgaatttctttaatataccatttcatggttgattttctttatatacctaagacatttttctttctctattttttctctggtttcaactttatataatatcattcttttaatagcattaccttataattcattatccatttccaagtcaaatgtaaccattgttacaccatcttatcacgtatatctcggtgtaaaagtgggatcctcggactaaggtggctcagatacgtaccatttgtcccaaaagggaaggcgcgccacaattagtttcttatctttagaggttggctcatcttaaaattctattttaattactataaaaagagggttattcctgttttagaatttgccacccaatttgccacccaattttttgtatctttttaattgttgaatttatattgttatttcttttcgattcttttagaactttaccttttgctaggtttataactaaaaacaaactacacaatacaatgcaatacaaaattcaaagaaatacagctttacaacaaggtttaaaattaaaaggtggtatgcaaatctttgttaaaactttaactggtaagaccattacattagaagtcgaatcatctgataccatcgataacgttaaacaaaagatccaagataaggaaggtattccacctgatcaacaaagattaatctttgccggtaagcaattagaagacggtagaaccttatcagactataacattcaaaaagaatctacattacacttggtcttgagattaagaggtggtatgcaaatttttgttaaaactttaactggtaagaccattacattagaagtcgaatcatctgatactatcgataacgttaaacaaaagattcaagacaaggaaggtattccacctgaccaacaaagattaatctttgctggtaagcaattagaagacggtagaaccttatcagactataacatccaaaaagaatctacattacacttggtcttgagattaagaggtggtatgcaaattttcgttaaaactttaaccggtaaaactatcactttggaagttgaatcttctgatactattgataatgtcaagcaaaagatccaagacaaggaaggtattccacctgaccaacaaagattaatctttgctggtaagcaattagaggatggtagaaccttatcagactacaacattcaaaaggaatctacattacacttggtcttaagattaagaggtggtgcaactgtgtaaaagtaacaatttttttatataaattatgtacacattattctaatgactaaactctacattgtttatctaatatttgactcactcaaaatcttttcacattcaatagtaataactgaattaacattatcagatttcattactttaagggtcatgatacaattatttctttgcgtttcattcatttgaagttttccaataagtaaacctgtcaatcttgcaaacagtaacatgatggattgtaaattgtctgatgtaccagtgattttctttgaaagttcccaaatctcatatattttatctgtatacagttccttttcggttttgttgagaatattatttttatttaattcaactagatcagtaatgattgataaaatttccctcttgtatttgaatttactatctgaattaggtaataaatctacatcagtaaatttgattaattgaatcatttgatttaatgcatattccaatgaatctaagtttattctttctccattgttgatagaaaaaataacgtttttgattaatgattgtttcaaaataacatatttcaaagaagattttttgctttcgatagcatcaacttccattttattcacatcatccagatcatcatcagaatcaatatcttctctatttaaaataccatcaactagctctaaatgtttcttatataatgtattattttcatggtatgtattcagtaagttacctaatgcaataatactgttgatcttatattctctattgtttctattacattcattcaaaactctttcctcgagttgagtgtataaatcatcattgtttgctaaaaatttatgtgacttgcatgctaatttgactaatgaatcaagtaatttatctttaccttcaaaaacacgtccaactaaagagtcaagaaggatttggtataattgatttaaatcagctggattcaaatcatcgagtttggtatctaatttgtcgacaatctcaataattgatagtgcaatagtttttcttaatgaaaatatttgagtttgaatatgtgatttaattaatgatatgatttcagggaagtataatttaattgaattaacacttgaacttgttgagtcatcccaaacctttctgaaattcttggaaatatcggagttcaaatcatgcattccaatgaatgataaaggtaaaaataatgaggcgtgagagttgaatttatcattggaaaagtttgaaatagattccagtgcaacagatgatattcttggtaatttttcattcattactagattcgactttcttctcaaaatagtatttgattagtttctttccaaaagattcagtttttttaacagatgcaatacgaatacaatatccggctgctatagcatatgatctagcaacggtttcattcttaccacttaactgtccagatgcaattttcaaaagttgatcaccgtatttatttacaatgaaaaaatgtcttaaaattaaattcacaataattttagagccagtaaccttggaaggtaagccaatggcacttttaacactttggccaaattgttcaatgaaagtctcaattgtattttcatcaagtaaatccattagtttttctatagcttccatcattggtgagctaccaaccataccaagtctttgagaatcaatgtcttcaacttttaaattgtacttatcagcatttaaagttaaataattaatagcttgaggttcaactgactgtcattaatgataccatttgacaaataatttcagttacgaaaggttttaaactctttgatgatgttgagatcaatttcataattgtatcaaaggcaaattttttaacatcttccgattcacttaataaaccattattacctaaaaagaatgggacaagttgtttaagaatagtttcggaatttgttttattagaggtactagtttaatttcataaccattgtattagctaaaaatttagttaatgaagtaccttcttttctaacagaacttttaatatcatccattgagcggaatgccatcatccaaattttctctaaatcatcttcaaaattactgaattcactttgtctcagcaagtcttgtaaacctgcagcactagcttctctaatacgccattctttatttcccataccagctaataattcattcaggattgaattgaaatttctactcaaagtttccttattatctgaaatcaaactattccatatattctccattgttcttgaaattgaagtacttggatcatatttgtatctaaataatttaggtattaatctttctgataaagatggattttcattcaataacttatcaagtttttccttatccaaaattgcacctaaaccaaatgccaaacctttctttgatgaccataaagcagaattcttagctaatgacataaacttataaacaagactaggattaccaacttcattagcaagactcaaaacatctttatatgttgaaactgattctcccatcacctgtatttaaaacaccagcatcaaataattctgtgtcctcgtcaacataaccattcatcaattcctttgaagtcttattggagtctgtaaatgttctcaataaattatgaacaagagtttcttgtatttcatagccacctttttcataagtaatacttaaccctcttgatgcagcttcttgaacaatttcttctctattagataagaatctcataaaagaattttgaatttcaccaattctttcgataataacttcatcagtacaatattgaacaatagacaataaccaaatacatgcagcttttcttagacttggtttcgtttgctttgatgcaaataagattttatctaatatgattgaacatctattaggaaactgttcatatgaattggtagaattaggaatatcattattatctttcattttcaaagacttccatccatcggctaaaatactaaaaccttccccactagtaaaaagattatcaatttgttttgtcgtatgagtttcaaaaaggatagactcaaaatcggtaaattcggctaaatgatcatcagttttatatgttaaagaaaggtaacaccatgtataaatagcagattcatgtgatttttgaactaaatttttcaattttggaattattttttctttaaatgaatcaacatttggtgataaatttaaagttggacctaaacaaccaaacatggataattgtgaaatacaatccaatgacatatttaatgatctacttgaagagctacttattaatccattttcaacaacaaataaaatcctatcgaataattcacttgaaataatatttattcttgaacgtaatgctaatcgtgaaacaataaaaccaatagtacaaattgatttcttttcaactagtttatttaaaatctcaataatggattgatcattcactgcatacgtagttgcaaatataccagtcaatttagatgtgtaataatatgattcatttgataataaatccagttgattatctaaaagtgatggtatgtagctggttaaactatctgtgacttctgagctacataatgatattaaccttgttaaagttgctaaaacattcagactagttgaggataaaacataatcaagtgataattgtataaatgaatataatgaactactagtaaatgattcaacatgatcattatcaacatcagtaaatttggatagctcagttatcatactagttttaacattttgatctaattctaaagctttatcaactcttgtttcccaatactgatcataagtaattatagtatttttactatctgaaatggaattcattataagacaacggaaagtaaaaatgattgctgtttcaaaatctataatatctttatattttaaaatatatttaaccattgaactaaataatggcattttaaattcttgttttgcctttgtatctggtaaaagattatcaattttattaattttaaataaataaggatttagtcctttctttgcttcttcaattgtttctaatttatcttgtttggaacttgctaaaatgttaatgattcttgattgtggatcatcaaatggaaataaataattgatgtatttaacagagataaatctaataatgttaattgtattatcatttacagttctttcatttgaatgatcaaagatatcaattattaaatcttttaatttgtccttttgatgttcatctaaagagtgtaaattatttgttaattccattaaaacatcttgaatggttggttgaagatctttttcttctgattttatcatatcaaataaaaattggaatataagggacagtctaataaaccgtttgatttctttaataataatcccaaagtttcatattgataacgacgattatctaaataattaggacttgatttatcggctgagatatcggataagttcagctttaattgagaaccaattttaaaaattgtttcatcatttgtatcagataatgaattcatagtggtaaaccatttaacaaatgcaacagttgattgtttcaatttcatattagttgaatttagtccaattgaagaaattttatcaatttttgaaccatcttgagttgcaattttactcttacaaagaatagataagattttttcttgtaattgagatttaacaggaccaattacgccttcaccaatgaatagtgaaattaatagattaataaatttttcattttcataatcaattgcacttcttttgaataaagtagatgagattgatgaaacttttgaattaccatcagtagctgcaattaagaaaattagtgatttataaaaatttgagaattgaattaattccacaagtttaatcatatttagtttataatcagataataatgttgaattgaaggttacaccagcataatatgaaaagaaagagcaatcatcttgagaaagacctggttgtacgatattatttggtattaaaccattaggagcctactgaaattggatttaataaggcgaacttataatatttaatcatcataaattccttatcgacatcattcatttgttggaaactttcagataataatgttaagaattttaatttttccttttcatcattagtttccgtaattaaagaatttaaaattttacaagatgtattaaataatcttgcactaattgaaattttaaaagttgaaatatccattaaaagtttaggaaaaatatctaattgttcatcaattgataatcttggaattgcctttgataaaaataaaagggaataagattgaacaattgttggatcttcatttgatttaatatttggagatttaatttgattaagtaaatctaatacaggtaattttaattgaggagttgcattaaatttagataataaaaatttaactgttttacctaattgaagtttaacatttttatcatttgaagtaaattttaaaagtaatggagcaagatatagatttaaagcagattgaaatttttcatttgaatcagccaatgcaaatctcaattcaactttttgaattagttgaagatcatgattgagtgattccatgattgattttgtttaatttttagaaaaaattcaggtaatttaagcaatttacagtaaaaatcaagatatttcaagggcaaattcttataatatatctccaaaataggcaattttccttgattccacattattttcaaatctttgtgattacagtaagtaaaaaataaatttcacgtgtgtaaacgtcgcgtctgtgcgtatgtaatacttttctagaatttagatctatatttcaccatgatgttgttacatttcatgccagtgaatagatgaaaagacactactaaatgaatgaagaaaagaaaacaaggataattataagatgagctatgcccccttagaccacaggaatgtaaatttaataaatcaaatactcaactgaataataaattagtacctaccatcctctaaatcttagtatatccggtctattaaatagagagaacgcgcagaaggaaaaaaaagaatcaaaattttgaaaaaatgggcagaatattttaagctaacataataatcagtgagagtgagcactgttctgtgaaatttttgttagataattttgattcagtcgtgtgtgtgtgttggaatttacaagatatttcatttcatttcattgaatttaaatttattgaattatatttttatcttcttttcctttgtcaacagtttattcttgttctcacttatacatatattacactacttcactacttcttctctagtagaaatagttctcaatttccaccattaacccctctactcattgactaactaattagctaatcatttcatttgaataatgactatttctgataggattaataaaaatagtaggcccagtacaagggattctggttcaacattaactaataattcaagtactacaactagtaataataataatattgttcataataattttcataataataatagacttagatcagtttcaccatcattttctaataattcatcatttattcaatcaaataattcattaaaatttcaaaatatacgatataaaggtaaattaccaattactgaaatacctgaattaaatgatttatgtaatgaatttttaagggataaaaatattacaggtttagcaatgcttgcaagacaagctggtttaccacctcatttaagatgtaaaatttggccaattttattaaaatatcatccttttgttcaacatccttacttagaattagatgatgatgatgaggaggaggaggatgaagaggatgaagaggaagatgacgaagaggaggacgaaggtggtgataataataatgataatgatagtaatagcaataaaaataataataataataatagagacgaaagtaatgaaagtagcggctcagaatcttcatcaaataaaaaatcaaaggacacttataaatataaaatacccattaaagaaatcaaatttgatttaaaaaaatatttaagatcttcggagagatatgctccaagtgttttaacttcagagattaaagatatgtttgaaattcaaaataaaatatttgatataattgaacatgcaattataaaatttttgaaaaaatggggtaaaattgttcattataatccaggtttaacatggattgctttaggcttagctgaatgggtaccacctttatcaacttctcaatttgttttatgtggtcgtgatgatattgctaaaaatggtacaaaattgaggaatataaatgataattattttgaaaaatttcataatctgtcatcttctttaacatctgaggcatcatcagttttcgaatctcctcataccgcatctccaaaatctgcaactcctttatcaagtcctttacaaacccctccaagtgcctttaaaccaatgtcatttgccgaaatttatgaaagaatggtattggttatattatattcgccaggatcctgaaacgattgaaaactatgctaaggaatcatagtactgataataaagatcatataaatgcaaataatagtattgtagataataataataaatcaactaggtgataataataatgatcatgatagtaataaatggtaatcaaaataaaaatacatttactgctggtaagacaaatgaatttggaaaattatcaacattaccatttactggtggattattatctgatagaatttcattatttttattttgtttaagaaaattattacctgaacttcattcacatttagttgaagaagattgtttaaatggtgattggattttatggtggttaaaatacgatggtagtaaagtttggtcaaggtatgatagaggtagaacatgggatttattattaggttatagaactgattgtcaaaattttgaaattgatatgaaatcattatctcatttaacacctgatcaagttagattattaggccaagatttattctggaatccaatggataatataaatgaagataataatgaaattgataatggtaattacaacattaaaggaaaaagagaaagaaatactgaaagagattgaagataatgaggatgcgattgatgatatatatgatgaatcatttggaattgagcaacatgatagatcattatcaattcttacattaatgtcaaaaaatcgtagtccatcattatcaattgagaaaactccaacattatcatcaatttcattaaattctccaaataccccattattaagtttatctgaaataagtaataaagaaattgaggaactgccaccattagataaaattgatacaaaagttgatataccattttcaaaagttcatcctcatgttgaaatgatttttataagtttagcatttttgaaaagtaaagaatttacaattacagaattagatcaaagtgaaattaaaacattatttaataggttatcaagtttaagaacagatcatacagaaattagttcatttataagtaataatacagaggaagttgatgaagttaataaaagtaatattaatgaaaatcaaagtcataatcataatcatgataatgataatgatcatgatataaataacacagatggtgatgaagattttgaaagtttacatacaaataattccaagattgatggtatggttccaacatatgttcgtaaatctaatagagatattgagaatgttcttattgaagcaggtgaattatggaggaaattcctttatatcagcatggttgaagaatctgaactcgtttaagatgtgctaaaaatctgttctatattattattaccattaacttttttttttgtaaaactttttttagtgtgaaggaagaaaaaagaattttcctctcataatatgaaatacgagaatgtaaataaagcgaacttaatactgatatcactgttaggtttagttttttatagagtttctgtacacaaagtaaagattataaacagttaatcaaacaaaacttaaacgataacaataaattttttttttggattttttagattaaatttgaatcaattaaatttaaataactaatgttataaaataagataatgaaataaaataaaataagtaaaataattaatttagtaagacaatgaaataatataatacaattaatgaattaaatggataaataataaaataaagttatattgtatcagcttaacttacattaataaagcacctgcagctaaagcagcagcacctgcagcatagtagttaccgtaagcaccgtttgcatgcgttatctgaagcagttgtgaatagttgagttaccgtgttctcttgctggacaatcagtaacttctggaccacatgaggtgataggtttcagatttggttgcggtttcgtaagaagttgcagctaaagcagcggaagcgaataagacgacggaggtgaattgcattgttagtgagtgacttgggttagacctttggttataaaagaagaaagaaagaaaagaaaagaaaagaagtataaaactcacgagagaaaacaaagaagaagtgaaagtaaacaaataaagaagaaaccagacgagtgcacaagattaattatgataagtcataaagttggaaaagaagggccttttatttggtaggaaaaacttcaactttgcagaaaatgcgactggaaaatattttcaccgcgctgtttgtgttttgccgttttgggaaatggctggagatacactggacaccggctcatcgacccggtttgaaaatctccgattatgtctctatgacactggtatttgttgtgcttggctggttttttccaacatgaattttattaatcagagtaggactgctggttgataaaggatttatcagttgatacttactggtttgataagtagtaatgttttgtagaaggattctaggcctttcgttacgacagaagagatatttagggtcgtcatcttccggaataccgaataacttcactatttcatctcaaccaactaagcataacaatactaataataataataataataatacatcttttaatcttgaaactcatgatatcgcagaaactttacaaaatgatcctaatttagaacttttctatgatgcaaaaacattaaatgaagtaaataatttgaataatccaaaacctgaaacttttgatccttatgatttttcaagtctacctacctatactactcctgataataatattacacattcaatagataatgaacctcaaactatgtcaactgaagattttatgaaaatgttagctgctgataatgctgaatctcctgatggtattttctttcggataaggaaaataatcatgcatcaggacaaacaacagatcaatttttggaatcaatgattcaaaatgatactactatttctgaagagaaagttgtgagttcttcaactccaaaacctcaaccaacaaataccatctttccaactactccaaatttagaactacttgaattcttgaaaagatttgaaatacccgaacatgatatattaccaaatttaaaaccaattgaaactataattaatactgacttacctctgattgtaatttccaaattaacggatccaagattaaatcttagtattgaaaaatatatttatgataatttcccagatccgaagaatccaataaacagatttgctagacgtttagtgctgtacaaaaactctaactgtattgttctgggtaaaaatcaaaatatttttagagaagttaatcttagattagcatccacattatccattccaattttgagaagattttcaggtggaggaactgttgttcatgatttaggtaattataatttctcattcatgtgtaataaaaatgaattttcaagaacaggatttacacaagaattgattacaaaattggaatcaacatgatccacacaacttagatcatcaattgactgttaatgataaaggtgacatggttagacaaatagatttgaaaaaagttagtggttctgcatttcaaatttcaaagggaaaatctttacatcatggtaccatgttactaaattcagatttgaaaactttaggtaaattgttgaagttaaatgaaacaagagcttctaatatatctgataatgcaacaaattcaattccaagtcctattgtaaatacaaaaataagtgaagatgattttattaatattataactacttcatttacaaataaattcggtttacctacaaatcttaatgtttctaaaataaataaatatgataatttatatttacataaattaggtaatgttgaatgtcaaatcttgaaaatagatgatttgattgatttacctagtgaaatacttgaaacttacaatcaattgaaaagttgggattggattttcggtaaatctccaaaattcaatataaagataaatttagataatgattcattgaaacttaaattctttgttgataaaggtagaattattactttagagtatgataaattagatgataatgatacaagattagattcattgattgctgcattatcaaataaggatgaagttgttaatttttcaagtaaatcattatcaatgtacattaaagaatcatcattaatgaaagaattatcttggcatgtagatcaatcattaaattatggaaatattggtatttctcattaactatagaatgttttgtaaatattatgcatgtatatagagtagttattcggtcttttataccgtatattgtgtttagcataaaaaaagttactaagttcaccattggtaaaactgctaacaatagataaatcaaaaaaacttaattttggcagtttacatatatacaaagtgtttttcaaattggtgttcccatttgggagaaatttacagaacacgcagaaagggacagaactttgccatacaaattatatttttcactaataatgcgaatttcgaaagcacagttctgtaaatttttaaaataaccagagcattgtgccaattttatagttacgtttaagctatttacgaattttcgtaaattaaattacgtatttatcttgttgttcttttcaactactcatccatcattatctattaagtctctagccttttatttttagaaatttgggttgcatatttctttcttgtacgacgaaatggttcttaattagtgatttttcctgtaaaatcaattgaactgtgttttgttgcaatctgttcaaaatattttgtaatcatgggaaaaaatgccctgatgtaaagttggcgttgttaccttttctaagtattttatttctaaataggtttattgtttttttgtcttttcgtcttttcactgaacaatttgaaaatttgaaaacaagtacaaaatatttgtttattcttgcttttttttgaatttttccaagtcttttttttttttttttattacattaatttcattaaaatatacaattttatacagattgattacttacgtcgcatatattattcatgcttcatcaattcaatatattttcatatactgaactaaatgtaaattatttctgtttgattattctcaatctttttcatctaatttagatctaataagaactaaacttttcatatttgaataacagataagtatctgtgataaatcttttgttaatcctgaactctggatcattctttttgcttttgtagcattgtttgttgaaaaatataattaacttgattattatatttgctttataagcatctttctttgttgatattaaaccaacaatattctttagatcaagttttatctctaattcttttagaattacttcaattcctttacagttgaaaaagacatgatgagtcccaccttccccttcgcagaattggcaagggtgataaaaatgggaattcaacattcctgtttgtaattcaaataattcattataatcaacatggttttgattggtgattctacccaaccaaccaaagcatgcttcccaatccaattggttttctattttaccatcccaataatctgaattaaatttatccttaaattcttctttgtaaaatctttttgaaaaatgtttaaatgattcaatattgatttcctgatttttattgaaaatttctacaattttccatttttgaacatttttttccaccattgaaaataacgatgttggattgaaatctgtagtttctttaacctgaaaatctgagtgaatatcagtcaaataataccatccttgcaaatatgggaaaatattagagtacaccattaatggtgctaatgtttttgaagaagcttcatccatgttgtaatttacagggtgttagataataaaattgatatttggttcaagatcgattattattttccctgtatttacatttattattttaggttttgcaacctttaacatttcatttgaaaaagtttcttcaatggtaatattacttctccatattttatgatttttatgcagaagaagattgaacggatatgttgaaattaatccattggaaatagtacctggtatttttatttttggtaagtcacgtgaccactaaaatttacttacagaaaaaacattaagttttaaacgtcaataagagatcccttggcccagttggttaaggcgtggtgctaataacgccaagatcagcagttcgatcctgctagggatcatttttagatacattcaatattttttataatgttgaagtaacataaattcaaactatttttttcattcttaagattatggtctggtatatttagaatagttatcaaggattactgaaaaggattgtatgtgttggcttagtatggcaacactgtgaaatttatggctcgtatagtaataagatattcggatacgaaaaataattttttccatgattttttcaacttgtcaacaacactcaaaaaagaaaaaaagcaataaaggactcactcaaccgtgttttttttcaacaaaattcaagctttttttttctttaaactttacctaatctgtcaaagagacaataaactaacatgtccatatcagaataccataaacttgttaaatcattaaaatccgatgaaatattggatatgtttccagaagttattcctttagagcaagcatcaggaatgtcatcaagtggaactcttgaaactgatggtgataaagatgttttcagtggtcatgatatagaacaaataaaactgatggcagaaaattgtatagttttagattatgatgatacacctattggatcaggaactaaaaaattatgtcatttaatggaaaatattgataaaggtttattacatcgtgcatttagtgtatttttatttgattctgaagataatttattattacaacaaagagctactgaaaaaattacatttgcagatatgtggacctaatacttgttgttcacatccactttgtgttgatactgaaatgggatctgataaaggtgatataaatttattagaaaatgctgtatatggtgctaaagtcgcagcacaaagaaagttattccacgaattaggtatagaagcagaagatgttccattaaaagattttaaatatttaacaagaattccattatatgtctccaagtaatggtccttggggtgaacacgaaattgattatattttaatcataagagcaaatgctaaagttaatccaaatgtaaatgaagtaagagactttaaatatgtctctaaggatgaattaaaggcaatgtttaagaatcctgaacttgttttcacaccatggtttaaactaatttgtgaatcttatcttttcaaatggtgggatgaccttaataacttgaaggaatcaactagtgacaacattgatcgtatgctttgattttgatttcatgactaatatatatatataaatgaaaaagtactgaatttccaatatttataaatagtatggagttttgaatcttctgttgtactctttcattcaaatgattacaatttttactatgattgtataattagtgcttccacttttttgttttgtttcattacttttataaaatcctaatatataaagtgttatagatagctgtttgatataataaaacaaaaacctatatatcagtgcttatccacgtttaatatactttatctctacacttagccgttgaaactatacattacctaagacgctaagacagagtcactatcccgagattaggcgcggtccagtttcagtgtacaaattttttcttatcaggaatttccccctgttaagcaaaatcgggttccctcaaccgcaatgataagaaaaatttaaattgtaattatcaattgtttagtcaggttgaaatcagtcaattttaactggttgtattgattttgaaatttatatgaattggcctgggaaacagttttaagtttgaaattattattgaatgctttcttttttaattgacagaggtgttttgataaacaaaagccattgatgctacaaattcaaaatttaaagactgaagaatcacttctgcttgcaactacagttgtttcacttatttcaattccatcaatctattatttttttaacaacaagaaaaatggtaaagctaaagctgcagtaaaacaggaaaaagagttccctaaaccaacaatagttccagtatctgatgattttgattgggaaaagcagaccccatatccatatagaccttataagaaaggaccttataaaatgaatcttgcaattcgtaaacttgacccaaatgatattatctgtattgaagatacttatcttgatagagttactttaagggaaaaattatttgatgagaagaaattatccggatttcatgaatctgctttagattctcttaaagaaacatacagatttattttcaatcatttattacagagatatccaaaatactttacatattccaatgacaaaaagacaataattaataaaataaaagagagttctgttcctgctaatccaagtgatcttagtggtaatgaattactaagaattattgcatcaaatattgaagaagatatgcttttgttgatcaaaaataatgatgaaggtgaacctgatgaatatgttttaagggcatctacttcattatttcctgcaggttttaatccagctcagaagatgaacttaccattaactaaaattcatacaccagttcctcattatgttgaaaagctacaaacttcaatgaacaaatttttttcaagaattaaaccatatgagtttattatcagaaacaactggtcaattcaaacacacaccaatctttgtgcaccaactggatctcatgcaacaaaggaagaagcaacaactattcatccattatatccacaagatttagattttaataaagttttctttagagttgaaaaacaatgttttactagattaccagaaacgggttcagatcttatgtttattagaacttatgtaacttcattaatggatttgagaggatcactcacagaagaagaaaaggaaattttatgtagtgctattgatggaataatgggtgattttgcaatatataaaaaaagaattcaatggggtgaagctgcaaaagcttttataatgggagaaagtaatggttctaacccggttaagactaaatatacttttgttagttaaatttgtttttataagtcatagttatatttagttactttttttataaatttataatgtttaacaataaaaattaaatacgtaacgggtcttttaagaaatgtcttgcactatttaattttgtaaaaacagttactatcttatataagatctaagataaaagaatttaaactaactggttttggaacaacatcatcctttgaagtatctcttttctcaccatattttgcaaaaccaagataacctttgtttgtcattggagtatagaaagattctctttcataattagttagttcataacctttctttaatctttcaactaaatcaggatttgaactatagtgacgtccaataccaattaataatttatcatcaccattaacaacatcctctaatttattcaattgtgtttggatcaacataaccaccgtttctaattaaaatacctttccagaaaaatctagcccatgacatgtcaattttattctcaacttcaccagttgggataagttgtgatctaggttcaacaactgaaatataagctaactctttaccttcattagctcttttttgtaattcacctaaaatataaccccaagtaacaattggattaatttcagaatcttcaccttcaccacccataaatttcatataaggagaaaatttaattccaacacgatttgcaccaattgcttcagtaagagcatcaacaatttctaatacaattcttgctctattttcaattgagccaccatattgatcagttcttttatttgagccaggttgaataaattgatcaattaatgtcatatgagcaccatgaatttcaacaaaatcaaatccagattcattaactgcctttttagctgtctctgcaaattttttaacaatttttttgatttgatcagttgataattcctttaattcaatatcattatcctcaaaatatttcttttgttgatcatccataaagattggtgatgcagcatagattggatcatacttaccattcagcattttttttcatcatcattgaatttgccattctgccaatataaagaagttgagctgaaatagaagtgccatgcttatgaactgcatcaacaataattttcatagcatcaactgttttttcattactccagcttggaaagaaaagttgagatgtaaattcttcttcaacaagtgcaccttccataatgattaaaccaccattgttttcagcacgttcttcataatatttcaacatagaatcagttggaatatgatcaatagtaactcttgaacgagaagttggtgcatgaacaactctattttccaaagtaacagggcccactttaactgatttaaataaatttgaattttctaatgtcattttattatcttatgtcttatcttgtttgttaatgtttaatttaagctataattttcaatttttaatatatcgatatttgagaagtttcacccctttttatagcacaatttcaattagtaatcatatttattcacttaacaacaaattgcttaattataaatcaaataatgtgagttagagttgtcaatatcagcaaattccgttatcatccttaaatccattaaattcttccttaattccgtcaaaaggctttatctgcttacaaatacaagaattgatacaatagacaaaaaaaaccagcaagtatcttacctagcagccctaaactattagatatgcaacaaaggatcaaacaaacaagataaacaagacaaaaagcacaaaacttaaagaaaaagttgaacattttggtagcaggattttattaatcatgatgcctcaatgataagaatttgatttaattttagcaaatcttgaaaatttccaattacgtaagtagaaatattacataagcactatgatggttattatttcaaaaaattgtattacgtaacaaaatttatttaaacacgcacaccctgtagagattaatgatttcagattggagattttggctgaatttcaaagcctgtaactgcaagacataccttctttctgtcgtgtttccattcatctattgatccatataagagtcaattaataaggtaagtgtataatgttttccaaaatatcacaaattggtaaaacatttgcagatgaaatcaatagaatcaatgacgaagttaataatccttcaaatggtcaacaatctcaattagttgatccagcatcagctaaaaaagtgttagatactaaaactcctgatgtatcagaacttgaaactcctgaaaatatgaaaaaagatgtagtgactgaaaatgtttcaacaacggcttcagatgataatacaagtaatcaatcagatgtatcttctaaattagatgattcaaaacttaaaaacaataataatgaaggagaaaataaacttaaacctaatacagatgataaacaacaatcagagcaagttgtacctggtactcaaataaaattttcctctttaccacctgaaattcgttcaagattagtaaaatatgttaaatatgagaacaaatatccttcattatacaatgcttataaaactgaaaaaaagaaatcttcattaattaaagcttttgaaaatatgttacaagagcaaactccatgttcaagtataggagaattagatggagttagagattatttacgtagtttaacaagtaaaagtgatatgttaacatctgaattagctaatataacaaaggagaagaaaagtgcagaagaaaaagctgctacattagataaaaaagttaaagagcttcaacaagctcttactactggtagagctgaagatagcaatgaaattaaaaatttaaaagaacagttgagatcacttaatgaagaaaaatcaaaacttcaagagatacaatctcaatatgaatcttcaaaattagaaaataaagctttattagacaaaattgaacaacttgaaaatgagaaagtggaatcaaaggtagattcaaaaatggaagaggaaaatacaacactaaagtttgaaaatgaacaattgaagaaacaattagatgaacttttagaagaaaaaaatagcatcaatgaaaaattggaaagtttaactgtatcatccaaatctaatgcatctagctctgaaaagaaaaatcaagaattaaactccaaagttgcagatttggaaaaatctttagaatcctctaaaaaactgaacgatctttttaaagaaaaacttgaaaagatgtggcaagaaaaagaagagaaagaaaaaacttctgagaaagaacaaccatcaaataattcaacaaatctatcaaagagtgctaaaaagagaaagaataagaaacaaaatcaaaaacaaaacaaacctgattcagatgaacccgtaaacaaaaaaacaacagaaattattccagtggaagaaaaattagtgactccaaaatcttcagatagtaaaaatgagattgaactcatagagattaaacatcaactttctgaattagaatcaaaatatagtgaagaagaaaagaaagttggtgaactcaccaaaacattaactgcaaagagcaacgaaattgaagatttgaaagatatgttaagagatgtaggtgattcattagtagaatctcaaaaggtcaataaagatacaactgatttatcaaaagaattgacaaaagttaagaatgaattagagtcgaaaaagacagaattagagatgctaagactacagaattcaactgcattaagtgattatgagaaaacaaaattatcacttactaagagaatagatgaatattcagctcaattgaatgatttacaaactaaatatgatagattagtatcaacaaattctattatgaatagaaaatacgaagaatctacaattaaaatcaatgactttgaaaaattactgaacagatacaaaacttcagaacaaaaatatcaatctcaaatcaaatcattatcagaggagaaaaataagttatctagtgatttacaatcattacaaaaatcatcaactgataatatttctaaagctaaagaatatgaaaatatcaaaaatcaactctccagaaaacaaactagtcttgtagaagctgaaaatagaattaagtttttagaagaagaaaagaataaaattaacgatctcatgattgaattaaaggttcaaaataaagaacttatttctaaggaaaaatcatttttagaaacaaagaagaatttaactgatgctaatttgaaactcaagtctgaactcactgatagttcattgagaataaacaagttatctcttgataacacaagattgagcaaagatcttgaagaatataaagataaatataatgaagttaaacatgtgaaaacgtcatctaatgatcaagttgagttatttaaaaagagagttgaggaattatcaatgagaaataaggagtatgaaaataaaattgatataattcaagaagagttaacacaatctagaaacatgttacaagaaagaattcgtgaaatgagtacaatgagaaaattattagttgataatgaagaaactcaaaataatgatcgtaaagaattgaagttgaagattgataaattgttggaagataaagaaatatctgataatgaatatatgatgacaataaaaaataaacaacgtgaattagatgagttaaagaggaaagtaaacgatttagcgaatgcattagaacaatccgagactatgaataaaaaacttaaagaacaagtaattaaactagacagtaacgctaattcaaatgataacgctggtcatacattagaaagacaattatcagataatcaaataagtgaatacaattctaaaatgatcgaatcattacgtgaatccttgaaaagaacagaaaacagagttaaggaatttgaagaagtgaatgaaaaattacgtatttctaaccaagaatcatctgataagttaatacgtttaaataagaagtataaactcttgtcacaacagtataagaggaaattttctgaaggtggaagtgccggcagtaatacaccaagtagaaatggaagctttttgtttaatactagtggaggtagtggaagacatgatagtatttctgttgcaccagacgaggttgaaacattattacatcctgatgttgtcaataatgttaccaacaacagtaaagaagaagaagatttgaaagagaaatccatttatattaaaaatgttttacttggttatttagaacacaaagagcaaagacaaatgttgttgccagttatcaaaatgttattatacatgacagatgaagatggtaaaaaacttgatagtttattaagtaataaataatttgtttctatagatagtttatgtacatgtatgtattattacaattttatttctgatttatcatccatataaggccttaaaacttcaggaatagttatcatttttgtttctggattgtagaaattttcaataattgctaaaaccattcttggaacagcacaagcagtaccatttaacgtatgaacaaatttgagttttttatcagccggatctctaaatttagtaatcaatcttcttgattggaattccagacaattagatgttgatgaaacttcaccccaggagcctctacctggcattaaaacttcaatatcaatcttcttataagcaggagcacctaaatcatcatgtggcatcactaaaacacgagcagttaaacctaaacttttaattaatgttttttgaaattcaacaatcgagtcaaattgtttcatactttcaagttcatcaggttttgtccatgagaaaagttcaactttggtaaattcatgaactctatacaatcctcttgtatctctgcctgctgcaccggcttcagctctataactacgagataaaccaaccatattaagcggtaattcattcggactaaactccttatttgaattaagtgcagcaaggggaatttcagctgtaccagtaagacataaatcatcgttttgtaattcatacacttgtgtttcattattattatctctaggcatgaatccacatgcattggtgatttctgttttaacgatggagggaggtaaaaccattgagaatcctgcctttctagcacatttaagtgagtattggattaatgcttgttctaataatgcaccatcaccaattaagtagtaccaacctctacctgaaactttggttgcctgagaaaaattaaccatattgaatctttccatgatctctttatgatctaatttagggtttggcgttattatataatcatcagtttgagatgccttaatttcatcagttggattgatgtattcaagtaaaatttgtttgtccttcacacttgaatgtatataatttggtaagtttgaaacttgtatgaataaatcgtcttctatttttttcatctcattttccttttcagcaataatcggtttatatttagcaagcttatccaatattccctcttgttgtactatattattgacattattcttcttttggttaattttgagatctttcaaaacaccttgcagggatttggattcatgtttgaaatttaatacagtttcattgattttttgtaaatgttcataatcttccttgaatgtatcttttaatgggaaaataacgtttcttcttgaacagattgttttaaaatcattatactcgttatatgcactctttaaatctaattgtgctttcttcaaagaatttgtagttctgacattaacagatgatgtggtggaagagttatatctacaaaaaatatctgcttttttcaaagatattctattaaaagccaacatttcgatcaaacactctctttattaataatatcaattcagaaccagtcaaacaagatcagttttctatgtagcaagatatacaatttcagctgaaaattatgtagattttcggaaaatgaacccactgcggaaaattacaatttacactgggtacttaaacaaagatagtaaaaattctatctttaataacactgaagtaaccttaatttatctcattttctctcctttttttcctttggactataactaataaacaacaatcaaatgtctcttgcaggtgccattggagaagagaaacaactgctttcacaactgagagatagacaacatgcatcaacaaattccacccgtagtcgttcagcttcaggaaaccctaaagatatgagtcgttcgggacgatcagcgagtagtggaccagctgcagtggaggagcttccatatccggaatctattacctttaatgatccatcagctcgtctctcaactgaaccaataaaggaagatgaagtagaggttagttcagaggaaagattaagtgatagtgattatgatttggactttcatgatgaaggtcgtgtacttccaaacttttccgtctctacaaatgatgattcgggaaatcttgctaagaaggttgacgaactcacattacttaatgataaaaccattttgaaaagagcagaatcagcaaaagtagcagattcaattcttgcatctgagagggcaataagtaatgctaaggcaattggaaggtctatccctaattcagttatctcaagactggaggaaacagcaaaagactcaggtaatgaaatacatgtagatccagaagagttttatcaagaaaaatcagccagaaagactaagttagaggaatatgcagtttataaaaagaaattaatttcatctggtaacacatctgaatttgttgcaccatatacaagagatcaagaggaaaaaattgattctgaattagcttctgttttaaattctaagactaaagtatcagatattgattctgatgtgctaaatcaacgagctatacgaacaatcacacgaggtaacttttttgaaactcttatctctaaaagtatcaaacatcctaaaagttttgtactttgtatggacttttcaacagagagtagatatgcattggaatggtgtattggaacggttttagtggattcttcagtattatacatcctgaatgttattgaagatgatgaatattcttcaatgaatttaaatggtataaatccagttacatcaaactcatcacttaatggttcatcctcttcaaatttacattctacacaatctaattcaagtaaatcgtatgcttcaaatgaacgtacgcgtgttaaaaatgttaatgaaataactaatcaagttcaagaattgttaaaattaacaaaacttcaagtgcatgtagtgattgaatcatgtcatcatccaatacctagacattttatagttggtgttattagacatatgtcaccaactttagtaattgttggttctaaaggttcaagtgcaattaaaggtgttcttatgggttcactttctaattacttggtgaggaaatcttccgtaccggtcatggtggttcgtaatagattaaagaaagcttcaaagaaaacacattttactaataatgtaacgtcattaagaggtttagcagatgctaaaatagactaaataaataattttatcaaaagaatattgaaattatatacactaaacttttaataaattaaataactcatgcaacgtaaacgaaaacttcatgatcatcatcatctcttctaatatattccttatcaaccaaatcttcaagtctcattttaatttgtgatggttgaggacgaaatcttttactaacatcttcaatcagtcgtattacttcagaaactaaaatttggtatttaacagatttccttgccttcattatacgaacaatagctgcatcaatttcatgatctcttgatttctgtatactttgtaatgtcttttcatgttcttcttcactctcaattttagaatttgcaactgttgcatcaatattattattactgttagtatctggtgctttattacttgatgatgaggtagaaattgctgcaattttaaatttggtttgtggatgtttaaattctaaatttaagctgaacatatcaccggaattaattgatcttgacattggaactttctttaaaattcttgtagttggaacgactgatatactttgtaaatgtctagtcaattcagacgcaggaattcttgtcatctgttgaatttcttcaaatgataatggtttttcaccatcctctgtatcttcatcattaaaacatgttagtataacaaatgccgctaatgttggcatattgattaaataacttttacttgggaaattcatttgtaaattcattgtacacatattaggtgtcccaaactaaatttctaccattataagtacttgcataaaatttctcaaaagaagctttggcaatatctaatacgggcacataattaacatcatccatcgctttattattactcattggccaaacatctcctgttaaaatggtaaaatcaatttccagtttcttgttattgtttagtctagctaaatcttttgctaatgttgagttatcaattgattcgtttttgaacttttgtgataaatcttgtgaaactttcatatctttgaacatattttcaaatttacttgtaaacgttgcaccagtttcagccttaagtttatgaatcatcattaattcaagttcagttgagatagatctattatttaataatcttcttgctaaatgtgttttatagtatttttcaaaaatatctttatcttttataaatttaaaaattaaaatacaatcattcaaagttttctcaacttcatccgttggtttatttttcaaagttttctttaaacattcatcaatatacaatgaaagatattcttgaattctattattttcatttaaaaatttaacaaatgcaaattctatttctctattcatttcaatatcagaatcaaatgatttagttataatcttatcatattttgatttataatcaaggaaatttttaatgtaattaattgcaaattgggtattattttctttatttgatgatttttttttagcagctgaatcattattcaactgagcttttgacaatcgtttaagatgttcgccattttccaaaacaagtgaatgtaaacaatcttttaaaatacgtttattagtatctattttactctgtaaaatgtaaactttttcaagtagttcaaaattatcactatcaatccaattcttcaatccatcatcttgtaagatcaaaatattttttaaattagaggagatcaaatcattaaacatcaaattttttaatttcctagaagatgattcaggtaaatataggctaaatcttgattcttcctcttttattatttcaacaattttattaatgaaaacagatccactttgtaattgtaataaatcttcaacaatttgataataatatcgatgtgaatgaataatcaactcaggctcaaaatatttattataataactatcaccatctaagtttatcaaagattcaaatattttaataattgatttaataataaatttatctatcatttcaccatttctattcaaatcgaaatagtttaaaaaagtttccagtatttgagtaccaagcaataattcagaattttccgttattttacaattaatcaatttatcttggaaaatatttaatccaacatcataaatcaacggtagtctatgctcttttgtaaaagttctatccatatacattgcaacttgactaattaaccaagttgaaatcaaataatctgaccataacaaattcaatttcttcaatacttctaatgaatctactttattcaattcaataataccattattattgacattattatcacccctctcaattataaaatctataatattaatttgtaatttggtatttaaatgtttagaaaactcatctttaattttattatataagaattcaccatttttagataatactaaattatatgcaattctatataattgttcaaatgaccattttgatgcatttttattttctatatcattaattgcatttgataaaatttcccaagattcaattggatcaactttatttgaagtcccaaattttctaggtggtctaatctttggtttattagtttgaggttttattggtatcatttgaggatatacagaagatgtttagttcaataagtgaaagaaaaaaagacaagattttcttgtaaaaaagtcaaaatagttttgttaaaggattgacattggcatgcgatttgaaaattccaacaacatgaaaatacaacaaatcacaaaacactcacttaattgttttcaggctttttctagtatatctagtactaccacacatatcctgtataagaccaaagaaatgtctgatatattggatgttatgaacatcaaatcctttccttcaaaaaagaaggaagggaagggattaaataatagtaataatgaacaacaacaacaacaacaacaatctaatgcagagagaagacaaatttatgcaccagatgaatttgcatctgttaataaacgtaggaaattatctgcaatgaatcgtgaactttatagtttaattggctcaaatgtaccaccattagctattgatacagcatcagtttcaaatgctggaggtggtaagaaatttaaagaaaaattatcaaagaataaaaatgatagtccatggagaaaattagggtttacaaatcctgcaagaaatgataaattaattttatatcattggactaaatctgcaccattaaaaaagaaagaagatgagataatagtagagaataaagaaggtgaaactgaagtagagaaaaatggcgatgagaaagtaacagaaattgatgataaattagaaataaataataaaaatgatgatattgaaatggattcaactgaatataaatatagtaaatataatactaaactgaatatacctgattttaccgaagatgattttgatgagattatgaaaattgaggaagaaaaggctaagaagattgaagaagctaaaaaagctgagaaagctaaaagagcagaagaagctaagaaaatagaggaagccaaaaaaattgaagaagctaagaagaccgaagaagctaagaaagtagaggaggcgaaaaaagcagaggaagcaaagaaagcagaggaagcaaagaaagcagaggaagcaaaaaaggcagaagaagcaaagaaagaaattgataaggagaaaaaagatgagcctaagaaggacaaaccacatacgaacgaaggaaagaaagacgaagaaaagaaagatgaaggaaagaaagaagagtcaaagaaggatacaacaaaaaaagacgaaacacataaagaagaagagaacaatgaaaccagtcctgtcaaaatagagaaaaaaaatgcaacaaaagaaggggaagttgatgataaaaccaaaaagacaacagaggaaaagaatgatgataaatctggaaaagcaatatctaaaccagttgaagaagtcaaggaaagaccttggacatatgaagagagcaaatatcttttcaaattatgcaatcaatttgatatgagatgggcagtaatatatgataattatcaagataaatatgaagatagaacattagaagatttaaaatcacaaatgtataagatatcgatatatgttttagagaaacaaggtaatgcaaatgattcagttttaattaaatcattgaaaaatttcagtaaagaaaaggaaattcatcgtaaattttatttaaataaattaattcatagagcaccaacggagattgcagaggaggaatcattagttattgaagcacgtaaatttgaacttgcagctaagaaaatgttaacagagagggcacaattattacaattattagattcaccacaatcatcagcatcagttcaacaatatttaacaccacaaggattaacacaattatataattcattaatgacatctgataagggtaaaaaacgtaaagttgagataccagttgcaccattacttggacctaatgcaataccacatacacaacatgttcacatgtcaaatcaaatgatgaataatagtaataatagtagtaatatgaatgtgaatatgaataatgttaatgctaataataataaggaaggtaaggatattaaggataaacgtcgtaatggtaatgttaagagtggtaattctaaggatacaacacctagtagtaagagtggtaataagaataataataataatgataatgataagaatttaagtaaattaagtgaagttcaattattattaaagaagaaattaagtaaggaagaattagaaatttatggaattgaattacatgaagatagattacaaccaggagttttcattagatcacaaaagatagcatcatttaaaccaagtgttcaagctaaagttcatgaaattttaggacaattaggattatcaattaaaccaattataccaactggaccagttagtaaaaaatttgatgaattattacatcaaattgcacatttagttgatttaaagaaacaaagtgataaattaattgcagagattgaattaattaaacgacagaaaggtatataaaaaaaattgtataatgtataatgttaattttaacgttcaagattaattgcattaccgaatttagcatataaagttgattttaaatttttaagattatttgataaatctgataaattttcattaattttatcaatttcaattgataaattatctgattttaattgtaaattttccattacttttgattgttttaatttaacgaaacaaccatcaccaattatatcactattagaagaggaaggattagatataccacctattagataatcaattaattcatcttcatcaattaattctaattctaaagttatatcatcaattgaatctttttcttgttgtaaatttgacaatttatcattaagtctatcataatgagtcattaaagtactaaatttattaattaataattgatcatctaaagtgacattagatgaattattttgaccttcaggtagtagttccattgtgtattataggtgttgatttaatgaaattgaacatctacagtatagaaactttgactttgaaaaattcatgtaagtaaaaatgaaataatagaaatcaaaaattacgtaatacacacacagacgcgacgacggtcatgtgaccaaaaaggttaaaattccgaaaggatgaattactataataatactaagcccacccctctctttcaatattgaccaatgagaatgctctgataaagaatttgataatctgatattatgatattgtgataagtggagagtactatactataatatactatactacacaactataatgtactatactactatactacactacataacatactaacatagacattattactaatatacacgaatacgagagagacatagagagggcagagtcaagtatagtaataccgctaaaaataaaaaaaaaaaaatggccaaaaattaaaaacagtcattctataattattaataatagtcattagagaaaccctatctgagggaatttttaatctataaaagggagcttatgacctgtttttgttttaattttattttttatgctgttgaattatttatatctatcttttattacctttagcttttcttatctttgtactttctgtttgtattttgtaatagtaatttattcttaatttttttttattaagcttaatcttcaagcctctgctacccaaaaaaacccccctcttattatatacatatatcccatcaaaatggcatatttattagaaaaaacaactactttacaaaaatatttagatttacctcaaaatggtaaaattatcgctgaatatgtttggattgattcattcggtaatttaagatctaaaggtagaactttaaataaaaaaattactgatgtatcccaattacctgaatggaattttgatggttcatcaactggtcaagctcctggtgataattcagatgtttaccttaaacctgttgctttctatcctgatccttttagaagaggtgataatataattgttttaactgaatgttggaataatgatggtactccaaataaatttaatcatagatttgaatcaaataaattaatgaaagctcattcaaaggaaaaagtttggtttggtttagaacaagaatatactttattagatccaattgatggttatatttatggttggccaaaaggtggtttcccagctcctcaaggtccttattattgtggtgttggttctgctaaagtttatgcaagagatgttattgaagctcattataaagcttgtctttattctggtttagaaatttcaggtattaatgctgaagttatgccttctcaatgggaatttcaagttggtccatgtgaaggtattaaaatgggtgatgaattatggatggctagatatttattagaaagagtttctgaagaatttggtgttaaagttactttccatccaaaacctttacaaggtgattggaatggtgcaggttgtcatactaatgtttcaactgctaatatgagagttgaaggtggtatgaaatatattaatgatgcaattgaaaaattatctaaaagacataaagaacatattgaattatatggtaaagataatgaacaaagattaactggtagacatgaaactgcttcaatggaaactttctcttcaggtgttgcaaatagaggtgcttcaattagaattccaagatctgttcaagctgaaggttatggttatttcgaagatagaagacctgcttcaaatattgatccttatttagttactggtattatggttgaaactatttgtggtgcagttcctgatgctgatatgtatcaagaattcaagagagaattagcttaattttttcatatccattttcaatttttttaaaaaaaaagtttaaattacaataacaataataatgatacattgattgaatcattatttccattatacaaaaaaataaaaaataatacaaatcataacacattaacaataaacaaaaaaaaacaaacagaaataataatttttttataatttataataactttattaatatcaatactttcattgtagtacattttcaaagtactaaagatattcataatttataattgtattttttttgttcttctatataatttttcacattgatcagataccaatcataatttaaaattttaatgcaggtcattaaaattggtaatctaatctaatctaatctaatctaataaattttaataaatacttacttctacacacctcctacacagtcttaaaactatgatagccagagtcaatattatacatgctctatctaatttttttatcccgcaaataaacgccattcaatcgaatttacaacattctattgttgaaagttattcacggcactcttgtatcaaattaatccgttggcattttattattataaatgataagtcatacagttattagcgggcagtttacttagtattccggaatcattccgtagtgccaatgtaatggggtttcatactgataacaacggttaaagtcggtaagagtaggagtttcttatcattgatctgacagtcgcatcgacgtgggatacggtggattgtggtttgtggttttaataggttaaataggtataatatatatggtagactatggatatttgattaatgtgtaaggtagggttttatttgttggtattgtgacgtttgttatatagtgttattttcaatgatttgtaatgaaagtatttgtttgttcattgtattttaaaatcgtatatacttcatatatcattacattttatatgataattataatttggtaaatgaattaggaattagatatatcaaataatgatgatataaatattaatacattatcctgtacataatacttcccaaataggaaataaaagaatctctctttaaaattttccaaattttcatgtaagcgaatctaagaactaaagccaccattaaatcgatttattcatcatgatctgggtaaagatactgttaaagtaattgtcaactcacttaacaattatgacagttcatgatcctgtattaaattatctaaatacacaatcaatcaccggtgaatatttaacttcaaatataaatgatataccattccttcattatactataactaaatatacccaatcaactaatgttttaaataaatatagtgaaaaattaacgaataataatgaaattaatgaaattgatgaaaatgatgaaaatgatgaaatttatatacctaaatataatggtaaattaacaaatgaaatgaaaattagattttatataatgcaatttagattagaattaataatgaatgaatttactttagcaaatggtacaatttcaagaattaaagatttatttagttcattaaaaattgatgaagaaattggtccattatcacaagttattttattaagaagtgaattattagaaattgaagcttgttataatttatcaataattgagaaaaataaagataaagaaaaagaaagtaaagaacttaatattattgataaaattgctgatattaaaaatactgttaattcatatattgataaatcatgtaaaattattttaaattcatttaatagatcaattgctttaagtatttcaaattcaggtaataaatcaatgagagattcaattgatttatatcaaattcagaaaaggaaatgtgaaattgatattgatttagttaatttagcttgttcaattgaattaaatttaaaagatgaaaataaagtttcattaaattcaaatttagcaattaatgaatcaattaatgcattaaatgatttattaattttaagacctttagatattgaaatttatcttaaattaacttatatttatcttaataaaggtttatttaaaatttcattattttatatttctgaatgtttacttaatggtggttcaaatgcttataatatttggtcattaagaggtgaaatttgttatttacaaagtaatgaaaaattaaataattcaattaatgatttaaaatattggttattaatttcaatttcttcatttatttattcaattgaattaaatgaaaattatttaagatcatggtgtggtttacatagtttgtttgaataaattattcaaattaaaggaaaaaaataaaaattttaaaattgatgaaatttattataatattgaaaatataaagaatgaaaaatttaaaaattttatacaatttaaaaataatttatcaattaatgatagagaaaatcttaattggattataaataaatatccaattaataataatattgataaatctacataattacacaacatccatcattactattattaccagtaatttgtccattattttgtgtgttattaccattaactaaattcattgatttattattatttgatgatgaaccttgtttaaattgatttttccttttattaccccaaatttcaggtatcaaaggatcttcagtttgttcagtataattaattaccattaatgcacaatttgatgctttaactcttggtatctttaattcttccattaatttaccattatatttatttattctatctaatgtcatttgctttttacgatttaatctaaatgcatgtactaatttttcacgtagtacaacagtttgtgtttcattaacattattaatattatttctttgttgagcttgatgactttgttggtttagtttttgtgattgctgttgtaattgttgctgtgattgttgattagttttctgacttttattaagttcaacaggtgaacttgatgaacttacgttaagtggctctgtatatgacatatatgttgaatttgttgcacttgttggtgtcaatgtatcttgtgtatattctcgtgtatattcttctgatgttggatattgactgatttccattttaactttgaattctttatcttataagtttatagatgaatgtatttagatttattttgtgtgtatatttgttatagatcagcttgttacgataaatagatatattacatgcaatatttacaaaattaacaatttaatttaagtttacttacttcattcaatatacacaatagtgaggactatcgtcattactttatatgaaaagtggcataaaaatctcgtaataggaaaaagagcaacaaagcactgagatatgaaacatgtcgatgtgtttcatgttgtcctctgagggcagaatcgcggagttggtaaagcacttgctaccctttttgctccatatctttatttactaatccccgttatacatgtgatatcttgcagtataatattggtattggcagagttatgagtctggagaacttggagtccacatgtagtttacatagtaatcttgaaagtggtgtatcgaaaaataatgataatagtaattcattagataatgataacaataagaaaaatagaggaatagtgtaccagttcaatgatactacagtgtcaataaaatatgttaaaaaggctccattatatatcttaaacaaaccttcaacatatcagagaaatctactaatcaaagatcattgtatgaactatgaattgatcaaaaacttacgtaaagaacaactagcttttcatgaatctgtaaataatataaatggaattgttgatcaactcgatgaatcattcaaattgcatataaagtcccaattggaacaaaatcatataattgaatcagaaggagaaggggatcctcagtttatgaaactaccacctacagattcacaagtaaaagaactagatgaaaaaattgatgaattggaaatgtcagataatactattgatttgatagagttttgtgaaacttcacttgtaaagttcaaagataatccaaattattggaaaactcaatttttagaataatatgtattgtatgttatgtatctagttatatgtattatacaagtgtaagttagttaaagatttttgaaccaatcatcagttgtaggatactcattactaccattgccattaaaattttgaaatccagttcctaagaaatcaaacattggagttataccttcaaatgaggaattattattcatattcattatgtcagtatcaatctgactaaataaatcattaagtaattcttgctgttgttgttcaaatacaactccattaccgttaggggtatctgtaattccatttgatgataataaatttgtattaatgcctgcattaattggtgactgacttttttgtttagaattaatatatccttcatcatatcttacttgtgaaattgagctatttctagaactatcaaagaaatttttagtattaaattcatcaatagttgaaggtatttttttactattatcaaatccaagagtatcatttattaatacactagatttacgactagatttaagtatattttttgtaacatcatcaatttcagaaaatccaataggtgaaggaatgaaaattgaattaacactgttattagaatcactattttcagaattaacagaaatatcacttcttttcattggtgtaaattttttagttgtaaataaatgaccgcctttcataccatctgcattataatttacaaaagttttaaagttgatctttgatccatttgacatattcatattatcaccactatcatttttattattttttagattaatcttaattttttcaattgctttttccctacctaattcatttaataaatcaaccattgaattagttgcaccatttttattaaatttatttgaaactttcatccacttagaaattctagttaatatcatacccattttacttgcaactttagaatttttagatagtttttcaatagattttactactttttcatgttcttcctcaacattaacttctaaatcaagttcttgggttttaattagtagtctagccctaattaatgcaactaatgcatgcattggtctataataaaaaaatgttgggaactcactcgtttgttcatctaatgcacaaaatgatgatataactttttcacttgccttgataagtctacttaatgtctcaatataaacttctgttaaaacatcacgacgtaataaaactttacaaacaatataatcatacattgtcattaataattgataatatataatggataataaatttctcatacttgatgatgaattaaacagattggaatccattgcaatcttttgcatccgtttctcatacccaaccattatatcctttaattttgagttattaactgggaaatctttttcatcactattatcattattattattagatgatctacgaactgattgatttgggaacccatttggacataaaaattggaaaatttcttcacctaatgcaacaagttttgaataataatataaaaatttatcagcttgatttgattcaccggataataataattgacaacatctttcatgaacgggtgtccaacttacaactttaaatctaggtaatgataatcctagcgatccacaacatgcataaactgccatataagatctaatcatttgtctttccattgaatcatcacttaatatatttgaagaattcttgtaaacttcattacctaaatccaaacatagagttaaattcaatgccattaataaactcatttgatgtctatatgacccccattttttaggtggagaacaccataatgataaaactaaatgaatttgaatgaaactaactgatatattaccaataattgatgttcgtactgataaattatcttctaaataataaagtaaggtatcatgtaaatctggatcatttaaacaagttaccgttataaatgacaataaaaccaatggttcattatcaagtaaccatttataagtataatgtttaggaaatgagacacatggccagtatatatgcaattctgtaaaaaatctatccatcctctctttggcttctgaactcgttataatattcaattttattaattccttcattatatttgattcacaagaaatccacggtaaattcggtatagatttaacagttccatctttcattgagttgattgaattagcttctttttcaatatgtttattggatgcatcatcatccccacttccattttctttacctttctcttttaatgtattgatcgtatgcaataacaatcgttgcgtttcaccaatgttgaaattgtaatgtttgtaaatcttcaatattggtatcatttgaaataatttcacctctttgaattccattaaatagtttatttgaatcatttatagatttttgtaattgagctaatgcactattaccctttaattttgttcttttacgaggtcttggttttgcatcagctaaagttggatcatcagtaactgaacatctcaaacccgccttaaaacatcttgtacaactttggaaacttgggtcttcaaaagtacatttcatcttaagtcgatggcatcttgcacatgctcttaatcttctgaaatttttagcaaaatcagtttgtgaatcattgtaatttgttacctgcgatcggtttaacgtggaattccatctatgaaatgcagtataatggggtaaaatttctttatcaaaatgtttaatctgaaaagggtaaaatgtaattctttcaattgcagttaagatctagtcaaaagatcctaatgatgagttaagttaaaggtttataaaaaggttatcaaagaaagaattgttgttatgatgagctaaacgaaattatttttttttccctcggacatccccggtattaccataattcttatcaaaagattacaatttaaacattatttacaaactatatctcaacatatcccataccttgaatgacaccaggtcttaagttggtcaatgctacaccagcatttgtaaatttcatcaattcaagataattctcatctctatgatacgatttaccatcaataaaaacaacatcatcataatcagaccaatgacattgaacattaacacctaaattagatatcaattcaacatcactatcatataagaacggtaaccactcaagtttcacagtaaaggtattcaaaccgtttgtagaattagtattttgccaactaagtttatgtaattcaactaaattaatacctttcatttgtttgtaaatccagttacctttatcatcacgactcattccatttggtacacttgtcgtaatttcatcaattggattaccctctttgtaaatcgttaccattttaacaggtgcagtaaatttaggattagatgcattgaaagttaaataacattgacgtgatccgaaaacatcaatttgaatagtactctctaatggagtgaatttatccaatgatccaatggaagtaatctctatactttcaacatttgtattggatagaatggacacatttagataatttgtgaaatcattatcttccatagttcctggtattaaataaggtctagtaccattatatgaacaagtttcagtttcacttgtattaaatttcaaacatttaatatcatcatttaaaattgttggaacatcattcaatatttgtggaatgtaaccttgtctaccaaatatatttgataaactagtatttgtattaatatcaaatgtttcaacatatcttaatttaattggattactttcactatatgaaacttcatagtatgaatttataattccataaaggaataaaccaattgttaattgaattgaaataaaatttaatttttgcataaatggtgataataatattgcctaaaagcataccaattaaaccaactaattcccatattgcttcatcatataatttattttcttgaattgtttcatgtaaggcatcaagaactagtttaccatcagtgaaaataaagaaagctgaaattggaactaaaattataaattggatcaaccaatcatattgtgatgaattaattgcattatgttttaatttatgtaaccaagaatctcttgtttcatgatcaattataatttcactactattcattaatggagtttcttcatttgaggagtttccgtttgattgattctcagagtttgattgattttgagaattatcttgtatgttatggacatgtgaattttgttcaggatcattattattagcctcattattattattatcattatatattgttgaatctgaataattaggtgaactgttgataattgttattttatttctcttttcatgacatggagattttctaaatatcattttcaataatccgataattgcagctaatgatgataaaatatagaaaactgttataaaataaccagcaatatttgaaaaagatttcatatgataagtcatccaaaccattgagaaccatgagacagtattcatttctagtataattattaatttttgatcatcaacagctttaagatgtgatgatatatttaaaatagtatatgatattaataaagtaattgaaaatattgtaattaatggattaaaataattaacatgacaataataatggatttttctcatataagtaatttaatatgaataaggttgaataatatgataatgcgattgagacagggaatctacaccaaccacgagctccaataaaccaagttttccttgcacctataatcatctgtaattataatcatgataacgggtacaataaccagtaaggcaatatttaaaacaattgcccaattaactactaaaattaaagaaccatttattgaatagatcaaaatataatgaagtatttaaatcatcatcgaaactatcacttgaataagaaacttcatttaaaatatccaaaacatttgacatcatcatccataatgaacctttagaagtatatttaatactatccttaatagtatgatagaaagatcttggtaaataaaatgcaatatcaattccacgtaaaccatttaattgataaatatgataatcagtttgtgatccaataaaacctgaatcaaaaccttcttgaaatatagaattagcaaaaggtttattaacataattataccaatcaataactgatttatcagtaccacggaaaagtactggtttaccacctgcacctgtaccttctaaattaatgaaaaatttaacatcattaaaccatttatgattaatgaaagcttcagcacctaaaaggccaaattcttcattattattaaaattgaaaataagagttctcattggttgattacctgattgagcaaaataatttaaaataccaatcattgaagcaatacccattccatcatcagttgtaccataagaagttggaacagaatcataatgtagctgatatcaaaatacctggtaatgtatcattaataccattaattttaactaataaattagaagattcataatagataattctattatcatcatttttcttatcaaagacatcatgctgattaattaaaattgtatgattattatcaatatcatcatctaatgaaatatagggaattttattaattattgatgaaatagtatctctaagataatcatgtaaataatcattttgatgagatgtaaatggatgtttagaggatgaaataaactgtaaactttcccaagcatttgataaaattagtggttcaggtattggttctcttaatgcaatattagttgaaatatcttgaataataattataataaaatacgtaaagaatacgaggaaggaaagggtagttttcctaaacctgaaaaggttccggaatgtctttacaaagtgcatgtagtggtttaatggattgtattctaaaagaaagcagtgataacatcaactgaagataaagcagcttaagaaggggactgtcctttaatagaaggataataataaattgagcctcccaatagacccatcgactcttaaaatattaaaatattaaaatttcatgaattttccattattaaatcgttgccaagggtcttttatctttatctggaagtagggagttacttatagaaataatggcacttgcagagttgaaaaacgatttaatactaagagctgctcgtggtgagaaagttgagagacctccatgttggttaatgcgtcaagctggtagatatttacctgaatatcataaagtaaaggatggtagagattttttcgaaacttgtagagatgcagaaattgcaagtgaaattacaattcaaccaattgatcattttgatggtttaattgatgctgcaattattttcagtgatatattagttattcctcaagctatgggtatggatgttcaaatgattgataaagttggaccaagatttgttgatccattaagaattccaaatgatcttaatagagttaattttaattgtgatgtttcaaaggaattagattgggctttcaaggcaataactttaacaagagaaaaattaaatggtagagttccattattaggattttgtggtgctccatggactttaatgtgttatatgattgaaggtggtggtacgaaaattttcagatttgttaaagaatggattttcaaatatccaaatgaaagtaaaaaattattacaaggtataactgatgttgcaattgaatttttagcattacaagttaaagcaggtgctcaaatgttacaaatttttgaaagttggggtggtgaattaagttgtgatgattttgataaattttcattgccttatttaaatcaaattgttgaaaaagttccattaagattaaaggaattaggtattaatgaaaaaattccaatgacagtttttgcaaaaggttcttggtatgcattagataaattatgtaattcaaattatgatgttgtttcattagattggttatttaaacctgaagatgcagttaaaattaataataatagagttactttacaaggtaatttagatccttgtgttatgtatggtagtaaagaaattataactcaagaagttgaaagaatgattaaaggttttggtggtggtaaaaaaaattatattgttaattttggtcatggtactcatccatttatggatcctgaacaaattagatttttcttacaagaatgtcatagaattggtagtcaataataatttataatctaatataatttttatataatatgtacataatgaacttcctataatctcattaaacctaatttaacaactttttgtaatgatttagttttaggatcatcaaattcagtttcaataaatttattaattctttctaacatttcatttaataattttaatgcaattttagattcatttgaatttgaatttgaattggaaatttctttaatttttctaattgatgctaatgcaacaacatatttaccattaataaaatcataattaaattgtccattaataaaataaacagtttcaggtttaattgttttaccatcacatctattaataagtttctctaattcatcaattttatccaattcattatttttaattaatttattaattaattcattacctaaaggatcagaatctaaaactttattataaattaacatattatccttccatttaatttcatcctttttatcctttttagatcttttatttaaatataatgaatgatctaatgcttttaataataatttattattttcctttgtaaatgaaattaatgacattaaatcagaataaatttcaccaactaatgattcatgatataaattatcttcccaatcaatcatttgtaaatatgaacgtaaagtacctttacggaaagcataaaaatggaaatcaaattgatcttcataatattctgcataaatttggaaaattgaaaaataacgttgtaatgcaagtccaagataagtttcaactttcttttgaattaaggtaatattagaatcttcattagaatcatcatcatgatcattatttaatactacttcaaattcatttaatgattttttaaataatcttgttaatgattttgaatattcagttataaaccaacgacattgaacaatatgtaaatctttaacaccttttggttcatcatcatttttagtaaataaggaagcaacatctatagcttcattaattaaatcagctctaagataatatttaacagatttactattaacaaatctatcttgtaaatctaataatcttgcatcattcataattttagaagcttcaattaaatgattttgatgttttaaaattcttgccttaaacatatataattcaatcaaagttggagtaatttcaattgattgattaatataatcaattgccaaatcaaattgattaattttatcaaaatgatgtgataagaaatatttaatccaagttaaaatgaggggatttttttcaatttcttcaaatgatttaacaatatttaagatgattgggattttatttgaatcattatataatgatttaatattattgaaaacagaaggaacaccacgtttaaataagtcttgtaaataatttgataaatgagatttaaattgttcatcattatgattaaggaatgttaatggtaaaaattttggtatatcaacttttggataaaatttagataatttatttaaaacgattaattttgaactggtattattttcaattttcaaagaattaaataaatcataataatattgaacattaagaggatttctctttaataataatctaatagttaattgagcatcatgaaatttttctaaaatcattaaagttttaaatttgagttctaataaaccagttatatcataacatttgaacttttcatttgaaattaataaattgttgatataatctaaagtttcatcatatttttctaaattgaaaaataataaagctttataaattaaacattctgaattttcagttaaatcatcatcaattaatttatctttaataatatcttcaatttgattttcaattttgattgaattattaaaatcattatttaaataataagcaattgaagttgaagaataattagcacgataaccaggttcagcttgtaaataatcaaatctagttttaattaaagatttataagttcttaattgagataaacaagatgataaatctcttaagatacctttatttgaaggattatttgaataagcaattgtataaaaatgagttgccatttcataatttttaatttgtctataataaagagcggctaaatgagctgaaattgaatttgaaggaccatatttaacagaagttttaattaaatcattacaaattgataagatattgggaggagttgaaattaataaatttggatcttttaaatctggtgattgaggatgataaaaatgtataattaaagcttttaaagcataagattgactatgtaaagaatttttctttaaaattttatcaattaaggttaaagattttttataatttttattttcataattttgtaaagcatctctaaattgtaattcaacctctgccattatgaatgtggagggggtgtattgattaaaaggaaagagtgaatgaaattataacaaaattgatggtccaatgtcgagattgaaattttccactattagctaataagggtattattactttatttattattttattattttatttagttctttatgaatcatacataaaagaatggtttgtagattgtacaaatgggaatacctataaataatgtcttctttctttagtaattcttgcaattgcatactttacactatattgtagttatttaacttactttactacctatcattacgtaatcctataccatattcaaagtcatagtataacaatagtattatattagctaataaaagaaacttaataaaaaaccctctatattataataaaatacgtacggcggttaattaattttactattattaatttacgctattgttatcttattcttatctttatattactttggtttatttcagtttattataaattgacttatttcctgtccttcatgtatttcttttcacttcaattgctctattctcttcttctctttctttctcttcttcttcttctcttctcttcttcttactctcccctctcttatcaacacatcctacactcgctttaaagatgttattcaatttatctgctttatctgctttagcggctattctttcatcagcttccgcttataaagctcaattcccttcttcagatgaattatttaaaccttcctatactacttctgaaactgcttcaaaatcatctgcttctgcttattcttcttacatcccatctgctgttgcaactgctggtttaaatgatacaatgtattctgattataaattatattctcctaaaatgttcattattaatatgttctcattagaagaatctccatttttagaaacttatgatttcgttaatgaaattcaaattcctggtttatccccaatttataattcaattcattgtgatgaaaattatgaattatgtcaattaacaactggtgaaggtgaaattaatgctgcttcaactttaaccgctttatcattatccccattctttgatttatctaaaactttcttctttagttgcaggtattgcaggtatctctccattaaagggtactattggtgatgttacttttgctaaatatgctgttcaaatcttagaatatgaattagatgcaagagatttaccttcaaattggactactggttattatgctttaggtactgatgaaccaaatgattatccaattaatatttatggtactgaagttttcgaattaaatgaaaatttaagagatcgtgctctctcattagctcaaaatgctttactttataatggttctaaaattaataatgaatttagattaacttataattatgcacctgctaatgaaactccaaaggcaattgcttgtgatactttaactggtgatacttattggtttggtaaattattagatgaaacttttgataattatactactttaattactaatggtactggtaattattgtacaactcaacaagaagataatgcgactttagaagctttaattagagctgcaatttatggtttagttgattttagtagaattgttgttatgagatcagcttcagattttacttattctgataattatttaggtaataaaactgttgaattctttgatgatgtttatcaaggtggtgttactgcttctttagttaatttagtttatgcttcacaaccttttattaatgatgttttaactaattttgatgattatgataatggtttatatgatgcagaaaattatattggtgatttctttaattcattaggtgaagatattgatattagaacttggggtaatccaacttggggtactgcttaattataaagattgtaaatctttgatcgaagatcgaagattgtagatctttatcttcatatgactatatgattatatgattatatccttgtatgctcatatctctatatgctcatattctcatatgcttgtatgattatatgactatatgattatatcttcatatcttcatatgcttatatgattatatgactatacattacaaatactttttgattccctttacaatttattttaactttcaatcgttatttctttaatattatatttactctttatactttgtaattattattattattattattattattatcataatttatactatattttaaatgattacctaataatcatcatccctatcacccccatactcccttcttttatcaatgtcaattgatattgatattaaattaatcaaacttaaattaattaatcaattaaataatgcaaagcaattttgtttattaactaatgaaaatttatcaaattcttttaaagatttacaagaaaaggacaaattatcaaataaattaatattctcaattaattcattcaatcatcaattattaattttcaaagaaattaataaatcaattttaaatcttttaaatgatcatcaatcaattattaaatcatttaaggaaaatgtggaattttcaattaatgaaagattccaattatataatcaattaaaatcaattgatgttaaaaaagatttaattactaataataataataatcatacattatatgattatattgatatttccgaatcagaattaatagttgatcaaataaatattcatttaaataaactaaatacattatgggataataaaattattaataatatcaaattaagatttcaaaatcattttaattatttacaaaatgaatggaatttaattatatcatttaaggaaaattatttaattaaaaaggatattgatttacaaattgatgaattaattgctaaaaatcatttattagaaaatgaaattgttattattttaaataaaatgaataatcaattagatgattgtatattgtttgaagatcaattattaaataataatacccctgatactaaattatatgataaaattaaaaaatatccttcatcatcattatctgaattaactgatttaactaataattgtgatattattaatcaaaattgtaaagatattaataaattcttgaaaatttacaaaaattgtcaatttaaattgaaaaattgccttgaagagataaatgattttaatttaaatattttaacaaaacaagtacaaaatattctcataccttcattaactataattaataaggaaaaattgaaaattgaacaattacaaatagatttacaaattttcattgatgattcaaaaaaatttattaaatcttatcataatttaattaatgaaattaatcgtaggaaaaaattaaatgaaaaagttgaattaatgattaattcatttcaaaatgatttacttaatttacaaaatgatgatattattattagatcgaaatttttaaatgaaaataatgattatttaccacaagatttaatatcaaattcattctttgaatctaaattccctgaaatttcagttgcttataaattggaagatttacctaaaaaaggaacgtaatattatttataattctatttacatgttttctatacatacttattcataattatcttcaagtaatttaaatttattaattatttcatcaactgataaattttcaattttcctattactacgtgatctaattgctaatttaccactttcaatttctttatcaccaactaatataatataattaaaacctttattaattgcatcctttgtcttaaatcctatagtttcatttctatcatcaatttcaacgaaaaatttatttgtatttaattttgttggattatcaaaatcttcaatttcattacttaattttttaacaattttatttgcaaattctttatgattattattaattggtataacaattgcttgtcttggtgataaccaaaatggccatttaccattaaaatgatcaattaataatgccataaatctttcaactgatccgaaaattgctctatgaatcataattggtatatcataatcatctttatcattttgatatcttagttcaaatctttgaggtaattggaaatctaattgaattgttgcagcttgatgttccttaccaaaattatctgttaataaaatatcaatttttggtccataaaatgcaccatcaccttctcttaatgaccaattattttcacctaattctttattaagtacattagataaatctttctctgcacgattccaatcatttaaattaccaataaaattatcaggtctagttgaaagcatcattttaaaattatttaaaccgaaaattttataacaaattttaattaatttaattgttttagaaatttcttcactaacttgttcatgtgtacaaaaaatatgtccatcatcttgatgaaatctacgtactctagttaatccagttaatgcaccacttgattcatttctatgtaaacttgaccaatcactaaatctaattggtaattctttatatgatctattaaatcttttgaaaacaatacaatgacctggacaattcattggttttaaaccataaatatcatccttttcactttcatcaaatttacttttatcattaccttcaactttaaacatatcttcagaatattttgcccaatgaccagaagtttcccataattgtttcttataaattaatggtgttataacttcagtaaatccttgcttttcttgttgtaacttcataaattttaatagtttattaaatatacgtgtaccatgtggtaaaaagaatacactaccaggagaatttgaatcaagcatatataactgttgttttgttgcaatctctaatgttgctgttgatgttgataatatacttttctcagatttacctccatgattatgtccatgatgagaacaaaagtttcttaataaagttctatacgagctaactttcaagctcatcctcactgtctctactcaacctacaactacaatgaatcaatccatcatgcaaattaactaaccacccatgaacaaattcatgttgaacaaatacactaatctctcccgacaagcgaatgtaaaattcccccaaacttccgcaaatacgcgataaatggccacttttctcaaaatgttttttttctatttaatttaactatttacaattacaattcatcatgttcaatatcattatcaataacagtctctttaatatctttattagatattaatttactaacttcttcatctaattcaacccattcactaatttgtcttctagccctatctaatttaggttccttagttaatggattattacatagatcaatagttttagcatcctttaatgattcatcactacaccaagtctcacaccataaccattcatttggtaatgaataaattttgattaaatcttgtaaattatttggtaaatcttgatctaaattacttaatgaattagaatcatatgaaagtgcttgataatgatgtcttaaaatatctcctgctgcaatttctctaaatttaattaaatcaataacatataatgcacttatatgatatttaaatttatcatttaataattctttccaatatcccgttttccaaaatctaaatggttccatttcatctctagtttcccccattggtgtatatccatatggtgcaccttctaattcaatatccattaattcctttaaatcagttctaacaatttgatcactatcaacaaatataactttatttaaatcttgtgggaataatacatcaaggaataatattttatacccccaaatagttctttgtctctctctttgacttcttaaccaaattggccatttatacataattaattcatattcaaatccatattcttttgataaaatcggtaaatttcccttcaattctggtgacatgaaattctcaataaaccaaaatttaactgaatgtttagtatttttcataactgatgaaatcattatacctaaaaatctttcatataaatgacctgatgcaactgtaaaaatattaatatctgcattatttgtacttggataaataaattcataaatcttagtcattaaattaatataaaaattggcaattaaactttcatttggtttattatcaattggttcaattaaattaattgattccataccccatgacttctcaaatcttggttcaataatagatccatcaagatcaatgatagttactttaatatctttttcaattgatttaaatactaatgaacctttagtataacttttaattccaaaatcccaaacacctggatttgccttgagttggaaatatccaaaatttgccataacattagtatctgatgaaatttcaccattatgaatttcaatcggtaatccaccaggtggattaaattcattttcttccctatctaaatatgatgcataaccttcaataagtatatttttcaattcaaatactccattaacaatatgtgaattagttaaatctaatttaatattatctaaatcagttgatgcttgcttaatatcaactaaccatctttgtggttcatttaatccaacattgaataatgttttctcaggaacattggagaaaactatgtgattattgatgttggtgaaatttacattaaaattacccttgtagaatctattaattggcatttcttcaatttctaaagttggtcttaaatgaacagttagtgaaataaatggaatattttcaaacaacggaataaatgatacgagttcttgaccttcctcagtgactggatcaataatgaaaataacagaaagtaatccattttctccattgactaatttttcaattctattggattcaggtaatgaagataaattaattcttggtaattcagatgataaataagtatcatcaattgggaaaaagaatgaatatgatgtcttccatgcaaaatcttcaaatttatcaaattcatcattaaagttaatttcaggtttatattctttatataatttctttaatgaattaaatctaataaatctttcatatttaacaattgattcgaatttactttcagttaaaaataaaccatcaatttgaatttgtctacctgcaataataagattaatatcattactatctttataatcaagtccatacatttcctttatagttctcaaagtatccttaacttcaaaatcatcttgaatactactataatccagcttttctaaaaattcgatttgttcattaatatcggaaattgctaataatttcttaaaatcagatgtagcataactatcaactataacaaatttaacacctcttgcattaattgaatattttaaaacttctttaacttgcttaatatatgcactatcaaggaaacaaccaattaagttaactgtaaccaaagcttcatttctcttagcatttttaacaattttcaatgaatctaatgcttgccaatgtttgaaagctttgaaagttgctggttgaagaaattgtttcttgataattgatatttcatcaggtaccaatttttcatctcttaacttaaatgaatctttccttaaatgtttacttaatgaagttttagaacttatttgagaattttgtaaatcagtcagctaataattttgcatctttaaaatattttgaatagctgcatcaatttcattaaaatcaaataagataccatttgaaaaaattgcaggtgtatctttagataatgcaaaagttttgaaaagatttggtaaatttttagtatatctattctctaatgcataatctaaatatgggaaatctaatgctctaaatgttaaaagtgtaacaggttcattagaactaacaaatctatttaacatgtataagtaattaaaagcttcttgaggaccagattcatggaaagtaccaaataatttacttacttgccttttcattccacccaccagtatttaataatggaattataccaatttgtattggaataccttgttcatgaacttgttgagtgaattgaactacatattcaagttgaattggatcaagaatattaatattaaaaatcaattgatgaatattttcctttgcttcaggtaatctaccattgagtacaccattattataaatatcctttgaatctttaaagtgtgaatatctcttatctttttcaatatcattcaaataaacgatagttttattaaattctgataaatcatatcttctggtcggatgaataaataattttatcatataagttgcaaaatcgattgttaaatctttagccatttgagttttcacacctatagtttcaaatattttcaaaaagtttaactctcttttgatagatttgattatttcaaataagtcagtcttcaatgaaggaattggtgcaccattaatgtaaatacctgttggaatataagttttcaaagattctacactatctgaataaatttgcatgatttcatcctctggatattcaagttcacttaaatggtatgcgtatttagggaattctgaaataattgaagataatgtagataatttatccagtgaattgttaataaaatgagtgaattttaaaccaagttgagataatttagataaatcaactttttgaatgtccttatagttaatttcaaaaatattatctcttgtaagttgttctggtttaatttcattttcagtattattgaagattaatctttcttgttgttcttttgtaaatcctctatcatcaattgcaatataatcagttcttttcaaattcaatgcagcaccataacctgataattgttgataatcatcggaaggattagaatcgacatatctccacactaaattcaatttaccaacacctgcaaattgatacatattgaaaaacatttttctaaaataattatctctaaaatcaccataaataatataagatttaccagtatttgaaataccaatcaatctatcaaatgggaatttaataacatcaaataacattgcattatctgtttccttcaacataaaagcagcttctgaatcacaataatattcgatacctacgggttcccttaataaaacatctctttcacattcattagtttcattaacataacttctataataatcataatgagcttgaattcttggagttgcaatataattagaaagatagagattaactaaatatttatcaacatcattagataataatgatatagcataatcatataattccgagggggtaattggaatgtaatcttcatcttcaattaatggaaattccccattttcataatcagcttcaatacctaataattttaacaccaattgatcataaagagtatcatttactaatgcgaatgattcaataatagataattcggaaggtgtattcttccaatttgcctcaagagagatatatattgaattaagtggtagtttatctgatacttgtccatctaattgctgtgcacatgtcaattgaagtgcaaacagagacagtactgtccatatgagtgcaatcatggttgtctgtcagtataaacgtaaagaatcatccatgcatttcatctatagactacacggaaccaaatggatgagccaggagagaaacatgttcggtgaaaattccgaggaaatttaaaggagcgggaggaaaagttttccaaagggcgaattttgaatatgataaagagtgtttaataaaatcttactgatgactaagtgtttttactggttttgatattggtttactttctagacaatgttatcatcacttacaagaggtacatatgcaagaactgcgctctctctaaggtttgttagatgccagtctagttctccaagtgctaagcttatcaataacgaatccccagagcagcaagaattacgtttgaagaaattacaacaacaacaacagcaacaacttcaacaacaacaaaaggaagattcacaaaagaagaaacttctagatcaaagtgggaataaaaataatgaacaagttgaaaatgttaaatcatcatcatcatcaaagaagataaagaaggttaaaactaagatgggatttagtaatgttgttaaagttccaagtactattagtttagagacaagagaaattttacttgataaattatatcaaggttttaatccattactgttacctattaaaccagtacgtaagaaggctaaatcaccaaaaattttagttaacatatatgaagatttaatgtttgatgaagatggatttgagaatgaagaagaaaatataagttcaataattggaccagaacttgaaatatcaaaatatattttcgataaaaatccagatgttgaaaataaacttaaagaattagataatgaaaataaggataataaatcaaataacaatattggtgatatattatttacttcaaggaaatctgatggtagtaaacttggtagagttagattacaatataagaagaacaggtttaaagacgttgaagaacagaagtataaagagtaaatctgatgataccaataatgatgataatgattattaataattgaatgattatatgatataataccatactattattctaaatttcttttggaccttttctacgataatatactctactctactgctactgcttctactactactaatgtcactaccaatacttgtaaatactcataacacttataataaagtctttataacactttataaactaaaaataaacccaattacgtaatcaaattagaaaatggggcttgcacattattatgtcatgtttatttccaaagactgattcattcctgaacagcccgttccctacttgttttcttcttttattctttttctctttgtcgtcatcatctagatctctccttcttaactaattaggaagtatattcaatgctggcccattttgctgcaactcttatcttgacttcaattgtcaatgcttggtctccaactgattcttatgctccaggtatcgttgattgtccaagttatttagatgaggatgattataatactgataatcgtacaggtttcctacgtagagcaaatggtattagtgatcttgaagaaaaatggatgcaagaaagagataatattacaatcgaacatttaaaagaattcttaagagatactaatttaaaaatactgattcttatcttgatgatattgtttcaaattcatctgctagaattcctcgtattgcattaagtttttctggtggtggttatcgtgcaatgctttgtgctgcaggtgaaatttcaggtttagataatagaactgttggtgcagattctcatggtttacctatcttagaagccgcttcatatatctctggtttatccggtggttcatggtttgtctcttcgttagtttataataattggacatcggtccaagaaatcgttgatcaatctggtgatgatgatgctatttgggatttaaatcataatatattagctccacatggtattaatattgttaaagatgcttcatattgggatgatttagatgatcaaattagccaaaagagagatgcaggttttgaagtttcaatgactgatccttggggtagaggtttatcttatcaatttttcccaggtttagatgataaaggtgcaagtatgacattctcgggtttacaagattgggaaattttcaaaaatcattcaatccctttcccaattgttgtatctgatggtagaactcctggtaataaaattatcaacggaaattcaactgtttttgaatttaatcctttcgaattaggttcttatgatggttatgttgatacctttgttgatctaaaatatgttggtactccaatggatgaaggtaaaccttcaggtaatggttcatgttgggcaggtcttgataatacaggttttgttttcggtacttcatcaactttatttaaccaatttttattacaattgaatacaaccgacttaagtggtttagcttacactgctgctaatcatctcttacaagatttaagtaaagatgaaaatgatattgctccatggcatccaaatcctttctttaattctccttggggttcatctgaacatatcatatcaaatgatacattatttttagtcgatggtggtgaagattcacaaaatgtcccattatatccattactgcaggaatcaagaggtgttgatgttatctttgcatttgataattcagctgatactgatgaaaattggccaaatggtgcttcattagttagtacctatgaaagacaatttaattcacattctgcaaatgtttcattcccttatgttccaactattgataccttcttacataataatttaactgcaaagccaacattttttggttgttatgcatctaatttaacttcattaatggaagaaacaaatacaacttatgttcctccattagtcatatacattgcaaatagaccttggagtttcaattcaaatacttcgactttcaaattatcttatgatgatgatgaaaaattaagtatgattaaaaatggttttgaaatttcaacttttaataatttaacaattgatgataatttctcaacttgtattggttgtgcaattttacaaagatcaaaggaaagaatgggtgaaccattaggtgatgaatgtaaatcttgttttgatgaatactgttgggatggtagtacctatacttatccagaaaatgcctctcaaccaaacgattttaccacaactggtagatacaataatacacaatcacaagcttcagcagatgaagaagttaatccagattcatcatctactgcctctgcatctgcctcatcaactgcaggaaattcaatctcttcaatctcttcaaaatcacataatgatgctaatatcaatggtgtttcacctttgtttactgtattagcattagcgcttagtgttcttgcattgaattgatgagtttcttgaacttatattactattatttattaccattattattataccttatttacagtctttttaattgaaaagaaatgattttaattcaaatttttatttttatttatttatatattatatttattattgtctaaacatatttcactgaacattgaatgcatacttaatgtaagtcaagatagagagatcaaaccaagaactgctaagccgccaacaaaatagtttaatcgcgtggctggtgtttactttaagattttcatgaatttaacatttgatccatggacaccaacataaacgaattcatttagattttaagtttacaaatcattaattgtttgctttctttatcattaaaataatggcagaatttgcaacatcacagataagaaactcaaataaacgtagaacccatgaaatagggaacaatgatcatagatctcatgaattagtggttgttgtgatgaaagctcaaggtttgagaaatgttcttaaaatggataaacaatcaccatttataactatcagaattcaagatcaagaagaaacgacacatgtagtatctagaggaggccaaacaccatattttgatgacgagctgtggtttaatttaaatggtgtagaggatagaactttacatattaatgtatatcatcaaaagaaaaatgatgcaaaactgatctgttgtggtgaagttgacttcacaccagcttttaaaagaagtataaaaaatggttatgatggatggtatgatttatattgggaaggtagagaagctggtagagtttatttagaaatcacatattatccaaagaaaggtgatgttccaattggaactgaaaatgttggaagaatgcaaatgtctgaaaaaacaattttacctgcaaatagtaaaaatggtgggtttagaaatacaccaaaggaaatatcaagtattagaagacaacaagatgaagaattgcctgaattaggtagtttaaatgtacgtgaatcttctaaatcaccaagtcgattagctaaatttgagaaaggatttcgaaattctagaagtttaagtaattcaccaactaagcatgataatagtttattaaattcaggtgatccaagtactccacctcctagttcaggtggtgggaattggttatcattcttggacaatacgattaaattaccatcaattttaaataatatcaattttagtcctaataataataatggatcaaatcataataataagaatggatcaccagatataaatgatgaattgactgctagagtaacgcaaaagatcgaaagtccagaattagtgaaacaacgacctactaaattgtttaatagtgatgatgaatatgatgatgatgacagtaatgatataattagtgtgacggataaatggaagaaaagtattgcttcaagacaggaaccaatatataaagaaagtgaccgtatagtttcatcgataacttttgatgattctactcgtaatttcactgatgatgatgatgaaagtgaagaagaatacacactaggtcaagctgttgacttaaataaatctgtgagatctaatagaaatactgcatatagcagatcaccttcaagagttccacaaattagacttgatgaagatgaaatgagacagagttacagtggaaggaagttacctccgttacataatagaaatgacagttttagtgatagcaatagtggtagtgatacggacgataatatgccacctccaccaccgaagcatattatttcaatgggatcattatttgagagtgtttctagtgattctgtaaataattttaaattatcttctaataaccatttacctaaagcaggtgaaactctactggatgattctccaagtagacaaatgagttggtatgagaaacgtaaacatgaaagaagaaagaggaattaaaccgataaattagggaacattttatttaatgtacaactgtatgtataaaattaattttattagatatatggtaaaagcttttaatagatattataatcatatggtaaatttagaatgctgcttcatcatcaccatcgtcaccttcatcaaagtcgtcaccatcatcgaaatatttttcagcattataatcgtcatcatcttcatcctcaaattcatcatcaatattttcttcttcttctctattatcgacatcatctatatcatcatcatttgcattagatacaacttcattaagtttttccataatttccttttgtctttcttcagcacttttaataagtttatccatatcagtaccattctttgaacttttcttatattttgtaacactaaatgattttttaccagattttgaattcataacagaatataattcatcggggaaatattgtaaatgaaatgggaagtcagttattgatttaccaattttaatttgttttctatatttatcagaatatctctttaaaccatcattaacaccaccttctaaatatacaatatttgattttttaccaccattatttgaattatcagttactaaacttttcaaattacctgtataaaatgatgagtctttcataattgttgttaaattaataaattgttggtaacaatcagtttcaatattagttggtgcaccattgattggaattgggaattcaaatgattgtgttgaaacttgttgaatatctgcccaatccagtccaaatggaaggagctgtcgttgaccacctgcaccacctctaaaactcattgttgatctgttactgttggtttatataacctattacaccaattataacttcaaaaaacaagttagcaaaatttatagtaagatcaatcgaagctttggaaaaaaaaatatttttcatgttgtatagattcataggggaatgtgcaggggtagttttagtggggagaagttatttctgcccagtgtattttcccagtgtgattttcaagtgatttgtaacctgtgggttacatgtgtgtataatatagacagtgtgtgtaattacagtcagtactgatatcaatatcttaatgttacaatgattatatgcttatatagtatttattaatgtttgttatgaagattttatatagtatagtaataaaaggattaatgtaaacctaacaggattactaatcttgtaagaattgattgatttcatcatcactgttgtaacctttatccaacttttcttgagctgcaattgccgctttctctatttcagcttcaaataaagcttgttgtttcttaacattacgtctagttgctttaccccaaccccaacttttttcacttttatgaataccttcatgttcaacaaataattcctctgcttctgcttttgcagcttcaccagttggatcattgatgagtttatcagcctttaattgtttatcatgttcaatttgagctttcagttgtctttgtttaaggaaatcagaaactcttgttcttaagaaaatataaccaccaataatgataacaagacgaattagttgataaacatcaaagttttcaaaaactcttctttgaattttatttacaactgtttctaaaatactcatttttgataacaggaagatgataacagtgaaagaagatacgaataaatcaaatcagaataatataaaaagaaggcctgtagacgttatgttaatgtgaagtttggaaagtcggaaattttccactttaagtgcgtggctcgttacgttattaataataatagaaggaatggtttacgttgagcaggcataatttggatagggaaaaacagtataatatataatggtaacgcatacaaaagatgatgccaagatgcagagtaaatcaaaaataagtaggaaatcattgaaaatacccaaaaagaataatccacctgaaggatttgataaaatacaacctacattgaaaaaatttcaagagaaattaaaggaaatacaggatgaagaatataatccatcaaagcctaaacatgaactaaaatggggtaatacatcgtataaatcatcaacgtagtcgatatgtttattcattattttatcaaaggaaattaatttcaaaggaattatacctttggttattaaaatataaatttgttgatggtgaacttatatctaaatggaggaaaagaggttatgaaaatctatgttgtttagaatgtattggacaaactgtatgtgtttgtcgtgttcctaaaagtgataggaaagtcagatcctgattttaaatgtgttagttgtggttgtagaggttgttcaagtaccgattaatagagaaaaaaaacttattatactagattatattattattaaaatatttacacataaaatcataggaactatataataaattccatatctgatcttttttcattaacaattgcataaccatccattggttcaaaagttgaaatcattctacccattacaacaattttatctaatttttcaatttcttccttttctgtaaatgaaatataatcaggtgttgtaactgtgacattttctaaaacaacattcataagttgatcaaaccctgttaatgtaccagtaactgatctacctgctcccattcctaatgttatttctttatttaataaaggttcaagatcaattattggaccacgttttggtgcaaatgtatttttcttttgttgacgttgattacgattattattcttttctgttgatgcatcttcatttttcacagtatcattaacgggttgttcatcagacatgtttacttattgaatgaacaataatatattatttccatgttaccatcaaaatcaacattggaaatcctcatgttataaaattatcatcaaatttcttacgtaatactattttaacttaatatcagtaaccttattatactttggtacttataatatacaatctataaactatataaaacgcagagcttccatttcttcaatctcctctgcttggttggtgttggattcatcatttaaagcaggtgcattcatatttaaaattgattgtttccatgcttgcatctcttctgtaactgtattaatcatacctgtcggaccatcataatatacactattagtttcattcaaccatttaccatcatctgattccctttcggatatatcatcatcatcatcattatcattattattattattatcctctttctcttctcctccttcttcttcgttatttttctcatataacttatttaaattattactctttttggaatgatttgaagattcttttgtaaattctttatgcattactttttgaaattcttcatttaaattatcaacttcatcctcttctaaatcaataaattcatcatttttatcctttaatttccataaattaatatcatcacctttaaaagattttaatgaaaaatgttcttcaactaaatgatcaattacttgccaaccataagcatttgcaaatcttcttctaacaatcatattattatgagcatcaggttgtaaataaactaaaactttcctccaactcataccttcatgccatctacgtgcaattttttcctcaaaaaatctatgtcttttattttgttccagttgagaaattataatatttttagataaatttgtatgattacttggaatcatgtcaggtgtataaattttatcatgtaaaataacattatatctacttttaggatcattaatatatttagttgatggtgatggtggtaataaaattttctttaatgatgtaataacagaagattttggtattgatgtcattgtttgtttaattttatcaactgacatctttgattgattatcataattattattgttttcagtatcgttattttgttcatcttcttcatctattgaatcatcaactgtttgaaaataattatatttatgagttgtctttggagcctgtaagttaggcaagcagtaaccaacagttgcaaatatttttctctttaaattatcaacaatatttaagtcagttttattattattaccattattattattattattattattattattccttagagattcattttcaagatcatctggtatttcacgagtttctgaattttcagttgaagaatttgaattttgtttattattattatttggatatttattatcataattttgataatcttcattagcttcttgtttagtttcaggtggattatcaccatgaatatctaaagtttcataaattttagttaaagctttccaatctaaatataataaagcacttgttcttaaaggtacaataccatcatttaaaacattagcataaactgttcttcttttaaattttttcaaaatttttcttgttggttcagatggtaataataataataaaggttgattaccatctaaatttaaatcttgaccagttttaccaacaataccaaattttaagaaagctttaacataggcaggattttcatttgatatacctaataaaggtgatgctaaagtaataaaattttctggatgaatttgtttaaaaaattctggataattataattaatataagaaattgcaaaagtttgaactggaccacctaatgaatgaccaataaatgaaattttattaacattattatttaaaccatttaaggaatcatttataataaattctgctaatcttctacctaaatatttaatacctctttcagttttacaaacattatcaaaataagctctaattactatattttcaccagttattgaagccattgattcaatttgttctttcaagtaaaacatatcagctgaggaatttgaatgtaatccatgatttaatagaactaaatgaataggttcatcaattgatttaggaggtttattccaaatatctaaagttgttaaatgttgaattgataaattatttggtttaaaatttgaatttttcaaatttgaataatttttatttaaagaggattcattatttgataataagatttcaaatttaatttcagcatttgtactgaaaacaatttgagatataatatcaacaatccaaatatatttatcatttaatttatttaaagttaatttatgaattaatgaattacctggtattatatttggttcatagaaaggttgatcatcagttataaaacaaggatttttatgagaataatctgaatttcttatatcacaataaatcatataagggccatgtaaatgagcagaattcatgagaacattttcaatatttttaactttaatgaaaagatttgaaccaatttcattaattatattatcaggggtataagtaattataaaacgatgaacatcacctattttaagagtacctgaattcttataatagatattatcagacattattataataattatcgcattgaataattgaattgaattgaattgaaataaattaaataaaataaattgtataaaagtatcctcctttccttcctttggtatatctaatttcatgataataataaaaataataataataataattacgtaatcaagtaaaaataaaataataaaatattacgtaatataatatatagacgcgtctataatataaaataaccattacgtaatcatcctccggtgtactacccaattaggaaacccgcacacaaaaaataaaaataaaaaggaattaaaacaccggtgtcggggatgaaaaaaaattatttgcaaggcgcaaagggtgggtgactcaatgaaaatttattattactattactattactatctctgactctattctacttttattttatatctccatgaatttttcactatatttgaatttcatcacataattttcatctttagattttatcttaaatttcacttgtttcgtttctttttgtttttgtatcttttattggttatttatttatttaatttctttctatctttcctattaaatagacaaattttcatatattagcctcctcaaaaatgctttctagaaatttattcaaatcagcaactgctgctcgtatacctgctgcatctgctgcaatagctagaaattcagtttataataataataatattaaatcatcatctctcaactcatcattatcttttaatcgtcatcgttcttcaacttcttcaattgttagagaaaatccttctcctgcttttaatcaagatttcgatgattcaaaatcatcttcttcttcttcttcttcatcaactattaaaatggattcttcattaattggtaaaactggtggtgaaattttccatgaaatgatgatacgtcataatgttgatacagttttcggttatccaggtggtgcaattttacctgtttatgatgcaatttataattctgataaatttaaattcgttttacctcgtcatgaacaaggtgctggtcatatggctgaaggttatgctagagcaagtggtaaacccggtgttgttttagttacttctggtcctggtgcaactaatgttataactcctatggctgatgctttagctgatggtatacctttagttgttttcactggtcaagttccaacaagtgcaattggtactgattctttccaagaagctgatgttgtaggtatttcaagatcttgttcaaaatggaatgttatggttaaaaatgttgcagaattaccaagaagaattaatgaagcttttgaaattgcaacttctggtagaccaggtcctgttttagttgatttaccaaaagatgttacagctgcagttcttaatcatgaaattccaattcatttaacaattccaaaaactacaattccaaaattaagtcaaaaagaattaactcaatatacaattcaatgtattgaacgttcagctgatttattgaaaaaggctaaaagaccaattatttatgcaggtgcaggtatcttaaattcagatgatggtccaaaaagattaaaagaattagctgataaagcttgtatacctgttacaactactttacaaggtttaggtacttttgatcaaaatgatgaaaaatctttagatatgttaggtatgcatggttcaggtgttgctaatttagcaattcaacatgctgatttaattattgctcttggtgctagatttgatgatagagttactggtactatatcaaaatttgctcctgctgcaagattagcagatcaagaaaatagaggtggtattattcattttgaaatatctgctaaaaatattaataaagttgttcaagcaactgaagcaattgaaggtgatgttactgaaaatttagaaattttcaatgatttaattgaaaaagttgattcacgtcctgaatggtttaaattaattaatgaatggaaagaaaaatatccttatgcttatcaattagaaactcctggttcattaatcaaacctcaaactttaatgaaagaaatttcaaaacaagctcatgcaactggtaaaccagttattgttacaactggtgttggtcaacatcaaatgtgggcagctcaacattttacttggacaaaaccaagaacttttattacatctggtggtttaggtactatgggttatggtttacctgctgcaattggtgctcaagttgcaaaacctgatgctttagttattgatattgatggtgatgcatcatttaatatgacattaactgaattatcatcagcagttcaatgtaatgcacctgttaaagtttgtgttttaaataatgaagaacaaggtatggttactcaatggcaatcattattttatgatcatagatattctcacactcatcaatcaaatccagattttatgaaattagctgattcaatgcatattaaaggtattcgtataactaaacaagaagaaatggttgaaggtattaaagaatggttaaattctgaaggtccagtacttttagaagtaatggttgaaaagaaagttcctgttttaccaatggttccaggtggtaaaggtttagatgaattcatttattttgatgctaattttgaaaaagaacaagctgaattaagacataagagaactaatggtaaacattaaatttaataaattttgtacatataggtttactatttaattttctcatttatgactttactatcttttacattccatcatttattatattacttattcttattctattcatcttatatttctaatagaaattgcattaaatttgcttttcaatatgtttatatttttttttacattttacattttacagtttacatctttttacaaaaaattggattttttttaatggttattttttacctttcggacaggtactaacaaaatttactctctattcattacaaattatattttacaaaacacttttctcaaatattttatactctatatcactttaactgatcatcgaacgatcattaaaattttaaaattagtattattattattattattattattattaacaatactaacctcttttgaaaaactttttcaaattttcattaaatgttgtcttattctccgtaaatgttttacttaaattcttctcaatattatccttactctgtaaaattgaattagttgcagttttaggactattgaaaaatccaaaattaggtaccggtgatgttgatggtgatgtatttgatgtgtctaatggtgcacttggtaattcaggtggcgttaatgttaaattagaattattatcattattcgatatacctgtaattgtacttggtaaataaattgatctggaattagtttttgcatgtccttgagatcttttaacatttgttgtaagttgtattaacaacatttaatttttctaaaaattcattactttcattaagttgtgaatcaatattacattcctcatatgatccaagttgaagtttaaacatatccatatatttgaatttatccttttctgtaacttcagatttcataatacctttaagttgtaaaactttcataaaatttgaaaaattcatatcaccaataattgaaaaataattattaataaatgtatccataggttttgttgataccataagaattttcaataaattatcaatattattaaatttagtatttatactacttttaaaacttgttgaactcaatatttttgatccaccctctaccattgttggtaaaatatttataaatgatttaatttcttgtatatcaagtttaaattgttctgccataactattgttattggttctaatttaacaatatttaatagaatatttttcaataacatatcaactattttatcaataagatttctgatgtaaattactttactgacttttttaaatataaattgacaatcttctcttataattgattttaaactatcaacatatcttgattctcctgtaacttcatctagtattagccagttaaaatttgataattctctccaagataattgaacatcattttcaattttatagaaaagtaaattaatacaataaacaactaattgtaaaaaaccatttgttgaagtttcaaattctacttgtgaagataatgattcaggttctatcaatgatttgattttttcctccaattgttcaattgttgatgaacaatatgatgcagtattcaatactaaacaaattaaatcaatgccttcctcttgacttttaatatcaactgaaattaatgatttgctatcaggtaatattgagtctaggattttatgctgatattgacctaagtatttattaaatattttagataatcttattaatgatttaccattggttaactttgataattgtcctaaaatttgtctataaactctgaacaactcacctgcactttctaaaatattaattgaatcttcaccattattattatttttatcatctttatcaacatcaactccttcacctgttttcttaaacattttatcaggatgtgaaaattcttgaattgccttttcaattatttttgattgactatctacccatatacttaaataaggttcaaaaactgatgaaattgatttggagaaatcaatgtttttcttatttgataattgatcatcaaaatcttgataatatttgaatttctttaataaataagcttcaaaatctaatgtatgagctaaagaatttaataaaacattaacatcagttcctttctttgtcgttgattctttctgtaaaacattattcaaatcatttctggtatatgaacaaaattgttcagttaatttataaggacatattccaagattttgggaatattttcaagtgttttgattcaaaattagataatacattttgaaaatagatataccttctattaagattatccaaagaacccgcttcttctgtactagtaaatatttgatttatatcctttaaagtttgctttatataccaagattccaattgatttttatgttgatcacctaacatttcaagtatatgacaagcttcaattaatttagggttgattaattcttcattaaattctgaatcaaaatcattgaaaatatcttgagttaatctatttttcattgaagatattaatctattcaatttattaacttcatcaatacttttaaaatcttgaaaatattcatttagttctaaaactgcacctaataattgtttaatttcactataatttttaatttgtctctcaatttctagttgtttatctaatctatcataggcagttactaacatttgtaaacgttttaaagttgtcattgtaaaagttaaattttttttacattgatctaattttttaatacttgcagtcattgaatttattgtattacctgtataacctgctaaagtcttcaaattttggaaactctctaataaatccaatacttgattatcaagattttcagtttgatctttatcagatttcaacatttccttatatttttcacgtttatctaaaatttcaacttctaaatttttttgatataattcagaaaatttattaatattatcaatatcattcaatgcagatggatcattaaataattcaaatatatcatgtattggatcataatttactgaatttatatcatttgaatgttgtttagaaccatctatagttccatttttgtgtctatttcttgaagaatctattaattccgactttagtgacttcatatccctcaaaatctaaatatatcacctatacaattgagcagatatcccgtgatctctccagtatattattattccaccagcctcttcttctacgagatggtctggtataataaacatgtagtaagcagtggctatatggaaaaccaccttcaacttcgcgccttgaaaaattaaaattttggaaatttggaaatttcaaaaaaacttcacttttcgtccaatttggcacatctacaatactgtacgttatttcttatttctttattttgacaacaagaaccttaataacaaagaatatgtctttaaaattacctggaaatcctaatagtggtctgttcaaacaaggatatcaagtccattcaaatactgatggtgcaattaatagaaatattcaagcatgtcgtgaaatttctaaaatgatttctacatcaattggaccttgtggtaaaaataagattattgttaataatttgagtaaaatctttattacaaatgatgctgccactatcttaagagaattagatgttgttcatccagctgttaaagttttagtaatgaattcagaacaacaagaagaagaaatgggtgataatactaattatgtcttagttttaggtggtgaattattaaatcttgcagaaaaattagtagttttaggtttaacaccaactgaaattattcaaggttataaaatggcaaataaatttgcaattaaagaattggaaaatttagttattgataaattaaataattttgatgataaatctgaattaatgaaaattattaaacctgtcattatgtcaaaacaatatggtcaagaagatataatttccgaattagtagttacagctgtgcaacatgtcatgccaaagggtaatcctcaatcttttaacgttgattctgttagagttgttaaaattatgggtggtgcattaccaaattcttttgttattaaaggtatggtattcccaagagaacctgaatctcaattaaagagaattaatcaaactgctaaagttgcaattttcaattgtcctgtcgatatatcagcatctgaaactaagggtactgttttattacataatgctgatgaaatgatgaattttagtaaaggtgaagaagatgaattacataaagttattaaagaaattcatgattctggtgttaaagttattgttgcaggtcaaggtattggtgaattagctttacattttatgaataaatataatttacttgtcttaaaagttccatctaaatttgatttaagacgtatatgtcgtatatgtggtgcaactcctttagttagattaggagctccaatgccagaagaaatgggtgtaattgatgttgtagaatgtactgaaattggttcagatcgtgtcacagttttcaaacaaaataaagaaacttcattaacttcaacaattgttatcagaggtgcaactcaaaataatatggatgatatagaacgtgcaattgatgatggtgttgcatcaattaaatctgttttaagagatccaagattattacctggtgcaggttctgttgaatcagaattagttaaaagaattactaattatggtgaaaaaactcctggtttattacaattaggtattaaaaaatttgctgaagcatttgaatttttaccaagattattatgtgaaacttcaggtttagatccaagtgaaatattaccaagattatatgcatctcatgatgataatgattcatcaactttaaaatatggtatcgatatcgaaagtgataatattgatgattgtcttttagatgttacatcagaaaatatatttgattcattaatcagtaaacaaaatgcaataaatcttgcaactgaagctgtttgtactatcttaagtgtggatcaaatcattgttgcaaagaaagcaggtggtccagctatgccaaagcaaccaaaaccaggaaattgggatcaagcagattaatttaatcattttagttaatcaacaaaatataaaaaagtaaaatattttttttatttttaatgtatagtgggtatataagtacataaatacaaaatcataagaaaaaaagttaataagtaatagtcgtggaagcatctatattgtgaattatcatcaatcaaataaagataataaaaatgttgataaaagcaatataaagtaaaatgtactttccagttgaatgttttgatgctgtattatccttatagtcgtcatcagtcaatgaaactgaaactatatcggtgtccttgtaatcatccatatggaaatttgttacattggtaataagtttactaatgccaccaagttcatcaacaaaattgtatattaaagaacgtgtagaattagttaaaaatgtatcaccttgggcatcccaccacattcctccacctaatccattatcaataacatatcttgccttttgtttagaaataacgggtgtatcataaaaaataatacctttatcatcagtatcatttttgtatgcatatgctgcaccaagatcaatatcagaatattcagtataacctgaaggtggtaaatcagaataactaataatacattctttatattggacatcgtcaaatttattcattgacactgattcaatgtttgcacaaccactgaagggtgagtaaagacgatcagtattgaatgatctaccatataatggcattcctaaaagaatctttgatttattgactaattcctttaatgatttcattgcattatcaactgaaattggactagcttttagcttaggatcagtgtataaatttgattgtaaacttgtgagtgtactccatgtacctgacatatcataacccattaaattataatagctgacaaatttttcaagggcagcaaaatcataatatttgtagacttcagtatcaactggaatagccaatgtgataatctttctctcttctggatattcagctaatttgttgaatcttttgtacaaatgcttaactaaataagttaacatttgtctatcatgttgatttgatgggaattcccaatcaatatcaacaccatcaaaacctaatctgtggatattttctgcaacattagcagcaaacgctttcacaactttcttactggtagcaacagctctgaatttatgaaatgatttactaccaccaattgataaagatatttttaatcttggatttgattgtcttaataatttaagttgaccaaccgtacctttaacttttaagttgtgtgaattttcattactttgcttgattaaaatatcagattcttcaagataatcactaatccatggtaatctgttatattcaccggcgttaacattatctgaaatattcaaatactttaaatcagtagtatcatctaccaatgttgaaatatttactggaatttccttttcaacttcccattcctcatctacccatttaatatttgtgttggcagtatcgatatctgcaaatgcataaaaaatatgtgtaacatgagacaaggggatttggaatggatctgtgtttggaaatgaccattgggaaaaataaactgcgttaacatattcattaggtgaatttatatcaagagtggtagcagctgttcctaaggaacaaagtgaaaaaaattctagtaattgggaataagttatcttcattgctaaaaaacgaatactttataggagcaatatgaaaagaagaaaaagaggtatatagaagtaatagaaacatttaaaatatgggtagttctgtggtttaaatagtaaaatcaaatcaacagaacacaattgatatctgactagatcaatgagttggtatactgtgaatggatcatgatttggtgatccaattacgtaatcgctgtttaattcaaatcatagaatatcttcttggtattagtaaagttatcgttagtcaatgacataacactaggttcactggacaagtttttgaggttttgaataaaagtgtctctattgttgaaacttccggaacgattttcagaaaatgttgatgtttgactatcggatctatgtgttgtttgtaataatggtaacaaagttacctttaatccatcaacgatgagtttaaaacctgtagcgtcagctcctcgtggtaaaattatatctgcattctctttggtatcattgatgtacaatttcatctcttgacgggaataatttaaataaacattaagtaacttctctaattttattttttcttgttcttttaaatcttcaacttcttggtcagttttaccctcatgtgactccttcaacacatcacgtttaatccaacgtcctagcctgacatctgcatcacaatcaataaatattctaactgttgctaaatcacaaatttgtttatcaaataatgcatacaatccataaactattatcacttcatattcaattctatcaatataaaggtttaaatcatctcttaatctgatgaaatcataatcatttggttgtcttgaaccaagtttctgcttttctgatgttaccaagtagttattcatattgatcaatttaattgatattttactacctccaaataacttttctaattgatcttttaatatataggcaccggatcttttacctgaagcatgaccaccgctaatcagtgctacaattgcgccattgtctccgtgtgaaagtgtcattgttatcgatattatacctaatcgaaagaaactagatgatgtttgatggcccagtaaccttagttcgagattagcatgaatccgaattttttttattatgataaaatttttctattatcacaagttgtgttttgtttctctaagtaagagatactggacaagggatctatatatccaaggatggaattcaatagagagcttgataatgatttaaaattcagtagtacttccaaaaaagttccagtcacttcaacatttgaagctatgggactcaaggagaatcttttaagaggtatttatggatatggatttacattaccatcagcaattcaatcaagagcaattacacaaattatatcgggacgtgataccattgcacaagcacaatccggtacaggtaaaacagcaacattttcaattggtatgctagaagttgttgatacaagtaataaatcatgtcaagcaattgttttatcaccaacaagagaattagctgtacaaattcaaaatgttatacgtgcattaggtgattatatgaatgttaaagtccatgcatgtgttggtggtaaaagtgtcggagatgatgttaaagcacttactaaaggacagcatattgttagtgggactcctggtagagttttagatatgatcaaaagaagaaatatcgttactagaaatgttaagatgattattttagatgaagcagatgaattattaggtaaaggattccaggaacaaatttatgatatttatagatatttaccacctggatgtcaagtcgttgttgttagtgcaacattaccaaaggaagttttacacatgacaaagaaatttatgagtgatccagttaagattttagttaaacgtgatgaaattacattggaaggtattaaacaatattttattcaagttgataaagaggaatggaaatttgatacattatgtgatttatatgattcattaactattacacaagctgttatattttgtaatacaaagaagaaagttgattggttaacaagtgaattgaaaaaggcaaatttcacagttatatcgatgcatggtgatatgaaacaagatgaaagagatagaattatgaatgaatttagattaggtaattcaagagttttagtctcaactgatgtttgggccagaggtattgatgttcaacaggtttcattagttataaattacgatttaccaactgatagagaaaattatattcatagaattggtagatcgggtagatttggtcgtaaaggtgttgcaattaattttgtaactgaggaagatgttacaacacttcatgaaattgaacaatattattcttcacaaattgaagaaatgcctgtgaatataagtagtatcatgtaaaaattatttaataactttgtatattttatcgttgttctgtttgaaaacattgatcaaatgattaagtctttctgtacttgtatttgatctcttggttatttcatcaatacttggtattttacaagaaaatccttcaatttcaatattccaggtgttagtttccttgttgattgtaagttgtgaagatgttggttgccattgaggtgataaactttcaagttcaacaatagtttttgtagttatatcaacataaatataaagcaacaaatcttcatcatcactggtatcgttggtagattgatcattggggtcattatgatctgggagttctataactttgtagtttatattaataattcgtttatcaaatatcggatctgtacttccttcattcaaagttaaagtgtcaattttgtttatcaaagaactatttgattcgatgtttgatgaattgaattgtgaaatttcggacaatgactcctgtgttgttttctcaattaagttgctagtatcgtatattgtaacattatagatagacatactattcagtattattccttcaaaagaaaaagatggaaggaactccttctagtaaaaggctaatgcacgactttaaaaaatcatgaactacgtacatgcacattaagtggttattattaaatttatgggtgtttataaaagtattttctacagattcaaataaaagaaaaaaaaaacttatttcttcttgttagaggttgagttctttggtaaagctttaacgaaaggaataaattctggttcaccaggaatgtattttcttaaaacttctggaatgactaaaccatcttcagtttggtagttttctaaaacacaacagagagcacgttcagttgcacataaagtagaatttaaacaatgaacatatttcttttccttttggttttgagttttaacaccacatctaatttcaagatttcttgattgataatcagtacaatttgaacatgaaactaattccttgaattctttttggtatgggaaccaagcttctaaatcgtatttctttgcagctgcattatttaattcacctgagacaataccaacaactctatatggtaaacctaaagattgatagaaaccttcagaattagcaatcatagtatcaaacatttcccaagatttttctggttcagtaatacagaattgttcaattttttcaaaagcatgaactctgaaaataccccaagcatctttaccatgagaacctgcttctcttctaaaacatgaagaataaccagcatattgaactggtaattgttcagctggagattcaaaccattcatttgagtgataagcagaaattggttgttctgaagttgcaattaaatatttttcatcatcaccatcagtaactttatataattcttcatcaaattcagataattgagcagtctttgccataacatctttattcatcataacaggtgattgtaatggagtataacctttacctgctaaatatgataaaccataattaattaaagcttgatttaagaaaacaccatattgtcttaagaaataacctctgtgaccaacaattttaacacctctttcaggatcataaccatctaatctaagtaaaacttcatgatgagataatttagctggtttaccagttgcagttgcaacatcagttaatttatcaaattcataaccttcaggagtccaagttctaacaagttcattattttcttcatcatttgaggtaacaactgattcatgaacaatattaccaacttgattaactttccatctaagttgtttatcagcttcttgttctgcatcaattgctttcttcttttctgcaataatttcatctttttcctttaaaagttcagaagcatcttcctttgccttaaattttaaaccaatatctttttgaactttatttaattttttatttaattcatctgcaacgaatcttaatctaacccattccttatattctgcgataatttcatcaacaatttcaacagatgcacctcttctcttttgagattctctgataatttctggattaccacccttttcttcaataaattgtaagatatctaacattgtagtatatgttttgctactttaataagaggtaaaaaaaaactataaagtataaatccttttctgttccaaccatatcagcatccattaaacaatcattgaaacggcagcctaagagaaaaaaccatgtggaaaattaaaaaaaaaatgtgtaatttcgagggttttagcttttactatgggagcgtcgcatcgacctgtgtgtgtgtctttggtgatgtcttgtcttgctattacatcttgctatgcttctagtagagtatagtagagtagagtagagtatattaaagagtattagagtattagagtaagtattaattaaaagaaattgaattagagtaaggttataaaaaaatcatcaagcacaggaaggtgtagtataatctctctttggtataactgttaatggagtgtaattgaaaagtaattgaccaaagaagtaacctaaaatcattgtaatgattaaataaccattataatacatccacattaacataataagataagaaactgtccattccatcaaatataatcctgaacgaccaatatgttcaacaggacttggataaatttcatttttcttcttttctaaccatgcaagataccatttatgagagaatgtgtttaacagtggtgtccaaaaatcagatcctggtgatttaacattgattttattctctgtattatcattattaattgatttatcagtctcctctgtacttggaatatcattatcattacattcaccttcattaccaccacagcatgatgcacatgtatcaatattaaatttttttactttataatcaacaattgcattatcatattcaactataaatctatgaaaccaacaatatgcaataacccaaaaaaatactccaatacatgtacctgcaaacatacctcttgaggtaacatgccaagttttagagaggaaacatgaatcaattgtataccaattccataacatagaaattttacaagcatgtggatcctttacagctcccattgccatctttgcttgaacttcattaggtaaaaaaatatcactcattgctatttgatttgtgtgtggtttactgaatttatgctaccaaagaggaattaatgcagtaaaaagaataaaatgaatctgtttaataaattgacaggtacatgggatgatataagaagtcaagggttcgccataataaaactttaaaaatgctcaattatcatgatgagaacaaatttattgttgtaaatgaaacattaatcaagtgattaaagtgatgaaaatgcttaaatttgaaaaaccctgcaatttactatgtgataatttgctcattttgagttcatttgttcctcattcggtaataaagttatcatattccatgatgagtacatttctaatgagttcttctcggattatgatgttacattggtatttgtagatagaaagggtaattgtatacttatatttaatgggatatatctctatattttatgaaaattgttttttattacatgtggtagcagatttaattttcatttcttttgagtaactatgaatatgaatacaatggatatgggaggtatgagtatggatatggcctcttcaactacctctgcaataatgaatactgctactacttcaagtacaatggatatgatgaatatgatgagtagtggtattatgacaagtatgagtagtatgtcaactggaatgtcaggtatggatggtatgagtggtagtaatagctctactgtatcatcatctagtatgaatatgaagatgagttgtacaatgtcaatgttatggaattggtatactgatgatgtttgctttatttctaaacaatggaaaacttcaacaaaagctaaatttggtggtacatgtgttggtgtgtttgctttattattaataattaattggtggagacgtatacttgttcaatataagattcattgtacagaagtacgtaaaattgaagtcaatgatattattaaagcaggtataattattgataaaaaaaaatcaacctttgataattttgatctaaataagaatacagatatgattacagaatgtatgataccattaatggaagcatttaaacatgaatggttttgggttttaaatagaaacttatcaattgaaattgatgacaaagtttatatttatccaagtatttgggaacatacactttattgtataggagatacaattgaatggtctgttcatcatgttattatgttgttatttatgtattttaatggatttgttttcatatcatgtatgattggtgcaggtgttggatatttattatttcaatataagaatatcaacatttcaaagaggggtgataatgtttcaaagagatgttgtttatagttataagtctttgatgcttttcttttatacgtttaatacttaatacttaataaatttaatagggtattgtttcaccagccgcatttagaccatatgtggcgcgtgtattttatactacaatctacataacaaggtaatcttaagtatcatgaactgtgatataacatcaatacaatcatatagacctcatatcatgtcatatcatgataacaatttcaaatgaataatttagtaatattaaaaataaatagagtatatagtaagaataagaataatagtatatgaatatgaatattccaagattattttgttggatcgtttctttggtaacctaaataaccactaactcttgattcaggtaataaagccaaatatttatcagcaatttctctacaatcttcataaccatttggaccattaactttaaaacaattttctaatgattttctaacaattttaagaatttcaactttaacaaattgttcctttaagagagattcttgtgcttttttaagatcatttgcatttctgtaatcaatttcatcaaatgaaacttctggagcgtgttgaaactttgattctgtaataaattaatgaaaatatgaaaaggtattaaatgttagtaaatagttcagtatttaaatattgttaataaagtaagtgaaacaatacaaatagccacatctgttatcaatacataccagccattgtaagaggaactctgtctgtctaatgaatgaaatgtacagaagatcttataaactctattataaccatatagctaatcccctcattggaaaaacatgaagaaatcagaaaaaatcttgaaatctgtgcaccttaaattttaacatgatattaatatttcatcaacatgattattattagttatatcatatcaccattacttcaatgatctttaataaatgcttgtaattgtttccttttatcgtgtttgttacgtctattattagtatttgtacactctcttttgatattctaacttaattagttctaatctcagacaacctatcacctctccgtctatcaaaagaaaaaaaatggtatcttcaaaaccattacttaagattaacgcacaatttgttgcaattgctcatactttatgttcttcaagtgcttttattgctgcttttattattggttatagcttacattttgaaaaaatcgttagaaatgaatattacggttatcccgatgaatggttcccaagtgtttcagctacaattggtgatagatatcctgaaagatcaattttccaaatcttaattgctttaacttcaggtccaagattcttattattattctttacttatattagattatttagaaaagattcaaaattacctaatattgcattattttcaggtttaataagaactgtcacttgtggtggttgggtttatataacttcaactgataatcatgattggcatgatattttcatgatttcatatatcgttttaacattaccttggaatatatcaattcttaaattaacacctcctagaacttcaattcataaatatagaaaattaacttcatatgcattctttggtactttaatacctttaatttatttatttattcaacataaaattcatcatttaccaggttcttattcttattatgcttattgtgaatggttattaattgttttcgatatcttatttgattcttggtcaattatagattttaaagatcttacccttgaaattaatccaactgaacaaaatgatgaatattttgctttaacttttaatattacttcaaataataattcaaaatatgaaaattataatgataataacaatgattctataattaatgaaaaatctttaaatgataaatttattccaaaatcaactgatagtttaaactcttcatatattcaaattttaattaatgtcattaatgcttatatgttttggtcaatttatacttcattatatttattagtttggtatttcccattatggtttatgggtattagtgggtttgaagttgtcattgtatcaactatgagtccagttttattattaaatacaaaaattagaaatttctcattcaataatccaaataaattaagaatttatggttgtatttttggtattggtagttgttttatttctgatccaatctgtcgtttattatctgtaagtgttggtaatgcatttgctttcatttcattaggtactgaagtttcacttattgcatcaactaaatctattgataatattaaaagttatgcaacaactttcatgttaggtttaacattatcatcaatttctaaatttgcattttggacaaataatccagtttggccaatcttaaatagtaaaacaggtggtttaaataaaattggtttgttaattggtttattatctgcttattatacctatattccaggtaaagtgaattttaaaactgataaaactttagaatctccaaaaacttcaattttacctgttgctattggagttggttcttacattttctcattgcatgcaatgttaacagatacctcagttattatcttatgggtttgggatggttatccaattactggtcctgttcctgttccttatggtgcagttacattaactgttatgtgtattggtatttatgctggattatacaattcaaattactataaattaattactataattggtgttattggttcaatcattctttatttattccatggttatttaggttattttggtggtatgttatatactttctggttatcatatattggaccaattgttttccatcaactttcattacattatattaatattggtaaagttttaacaatttcaacattagttactataattataactttaatgcatgtttgggttgttgcatatgcattcgttccaggtgggccattattacgtgaaagaactgatattgttttaggattatcagttttagcaatttgtttattaattttgaatattccaaaatctaatgaaaattcaaatgaatcaattattgataaaaaatcagagaaaaaggatactaatacaaagaaaacttttaaattatcaaaattcatgaatattataatttcattcttattattatcatatattattgcatttaatagatttcaatatacaacaccaaaaccatatcatccaaaatcaagattagtaactgcaggtatttggacaattcattttggattagataatgatatgtgggcaagtgaatatcgtatgagagatttaattcgtgatgcagaacttgatattgttggattattagaatctgatacaagtagaattattatgggtaatcgtgatttaactcaaaggaattgcagaagaattagatatgtacgcagattttggacctggaccaaataaacatacatggggttcagcattattatctaaatttccaattttaaattcaactcatcatttattaccatcaccagttggtgaattagcacctgcaattcatgcaactttagatatgtatggtacattggttgatgttgttgttttccattcaggtcaagaagaggatgaagaagatagaagattacaaagtttatatttacaagaattaatgggatcaagtgataaaccaatgattttattaagttatttagttgttaatccattagaaggtaattataatacttatgttagtgaaaaatcaggtatgcatgatattgatccaagtgatgatgatcgttggtgtgaatatattctttataaaaaattgaagagaacaggttatgcaagaattagtagaagtagtattactgatactgaattacaagttggtaaatttgttgttccattaccaggtgaaattaatgaagattattcaaataataaagtacctgaagtttggattaatcaagataagagattccctgatatgttccgaggtgaaggtgttagagatcatagatatcatgtctttgaagaacctagatatttcatttaattttgtttataagtttgtttaacatataccagttgtttatacataaacgataatagtaatataaaacatttacgtaatcatctttttattatctcatgacatgtaaacatagatgagaaaaaattccagccaccttccttaattcggtagttattcagccagccaccagtgtttaagataaattattattcagttagttatacaatgacatacagtaacagtaatgataaaggggctgtatagatacaataattaaggtttgtctctctaaaatgattaatttatggctgtttcttcttttatcttttcagtcttccccagtaattaatctgtttactgaaacaactcatagctaatttctaacttataaatcacaagaaacaaagtcaatcgattaaatcaaataaaacaaaacaacattaatgacaagctcacaacataatgctaaaccatcatactttggagatcaattaagatatgaatttccatcatcatcagaagaatcactaatatcagaaaaagaacattcaccagttataattgaaagagcaggttctatttttattaaatctggaattccaaaagtttcaccatttccaacaattgaagatgaaaacaaggtagaggaagtacttagtaaaaaatatggtactcaaagtacaacatccttaccaattgaagaaaaactagatgaacttgaagatattgcagaaattgaaattggtgaagagactgaaaacgttaaagaaaaaggtgaagaaaaagttgaagacatagagacaagtatagaaagtaggaagagagcaaatagtgaagaatctcattataacgattctttatatgaagataaatcaattacagaagcatcacttattagaaaaaggccatcattaaaagctgttaattcaatatcttccagtaaatttgttaatccatacttaagaagaagtgttttaagaaaatataagggagaagttgaaaaagatgatgtattaggtaaatttgttgaacaattagagaaagaagttgaaccaagtaatatcaataatactatcaatgatacaactattaatactatgaatactgatgatttggaaattccaaggagaagttccaaaagagttagtcaaatgattaaaagaaatccaagtaagaatattagtcgaatgaatactataagaagtcataatagtgctaatacaattagtcgaagaaaatctaaacgtgatgcagatagagttaagagatcattatctatacagactttagctagtgatgtacgaaaatctattcaaggaagaagttttaaaagtgttgattttggagcattagataaattattggaggaattattagatgttcaaacatcatctagtgaatcaagtgagagaagtttaagtttgaaatcagttcgtaagagaagtatatcacgtcatagtactagaagtagtaatagtagtagagttaattctgttcataacttgaatagagaagcagctgataaatggtgatgtttttgttgctaatgcatatactccattgattaaaccttttagtgctactgagaatgaaagtggaaatgttaaaagagttgttagtttaaaagaagtttatcatcaatgcaaaaaagtttacaaccagagactatgatttataataaagagttacctaaaatagttgaagaagataaatgtgaactaaaacgttccaatgcagttaaatataaaaatagattcattgaaagtattatagttctattagacactattaaaagatttggtaagagagtaattaataattttaaagtttcaagtaagaaagttgttggaataaagagaggaaagagtatgatgaagagaagtaaatcagttaaagatttaaagattggacaaccagtatctgttgatattcatcaaacagcatttaagacacataatttgaatactgaaacatgtttcacgtaagacatttagtgttggaggtagtagtagtgataatactaatgaaagaattttattaaattccaaacatttaagtacaattgaatcaattaatgaagatactaatgaaaccaatggtagtagtaatgttgaaaatgatcaaattgtattattatggaaacactatttaagtacatgtattgccaatagggttgatatgaaactagaattagttaatgcaaataatcttgaaagagttaaatcaatccaaagtaattcaagtaaattaagttcagttaatgaaaagcaagaaattgagagattgatggataaatatgttgcatcagagagttcaagtagaagtgatactattaagaaaggtgatggagatatcaatagtaaatcatttgattggtttgcaagttttgaatcattaaattcatctgaattactttctgaaaaatcatttgatcataatgatgataataatagttcatcagacagtgaatggtcgactataatgactgatggaattaacaatttagattatgaagattcatcaagtatttcaacaattgaagaagaacatgaagcagatattttaaccgatgaagaatatgataatggattaatgaatttaggagatgaaattaagaaaaattcagctacaactaatgatatatccaaatgtatgcaatctaatattaagaattcagtaggtatgttgaatttacaaggtgttttaaagaatgttagtttaagtagtaaaccaagtaaatcaacattagcaaagaagaagagtgttgttatatccgatattaaatcaatgaacagtaaatataataaggaagttagaactgcatcaccatcaactttatctagtagtagaagctctagtatgtcagatatgttctcattccaagccagtgttgttgtataattatgtataagatctaactagaattaaaataatctaaataataatcctaaacccaacagacagtcctctcatacaaactgaaatacgcgcttgaaaaacaaaaaagctgaaaattttaaaactgaaaactttataaatttccatcaattccagcgtaaatggccgcacttttctctcttatcttggaccccatcatgaaaatttatacaaaaaccgttattgtcccatctttttgaggtatcactagttgattggatttaattaactgattttttattaaaggaagtattgagaaattgaactgaaaagttttcgctttatgaacacgtgtacttcctcctttgaaatgtactctctttctttaacaacgtacaaatcatgaatccgatgaatcaaactagagaagatgatactaaagcagcggctgaattagatgaacattcagagaaacattcaactcaagacattattgatgagagagtattgataaatgatattttatcacagtttgctaatgaggacaaggaagcttctctattaattggtgatatctttaagaatcttttggataatgaacatagtattatagactttgtggaagaggcgttgaaggaatgtacagaggaagaaattcttgaatattgtgctgaggaagtaaaagaatttgaagctatgactggtactaagtataaagatattgctaaagatatggaacattttgattctactgatgaatcaaaaaaagatgcttattataatagattgagagattatatgaaatattcctttacaatgggttgggatattaaatctaaaacattaaagaaaaatacgtatcatatttttgattattttggcattgaaatgcctgaaggaattgacaaagttgaagcagaaaaaaacttcaaagtacgaagggttgactttttataaagaaagaaacagagcaaaagtactgtcagaactatgttataaaaggtgatgagtattttcatgattattataagagaagtaatgattttagaatgacgcactgcttatcaattggtacaagttctttttatcctgttgagcaaaacatggattttaaatatgatatttacatgaaatacgtagataaacattttgatgttttagagtcaaaaccattattgtttgccccagaatcatttggagcaacaaatcttgaagtaattgaaagtgtttgggagcattatattccagataaagataaaaaatcgatcaatgcaatttggaaaagtttcaaagactataaaacttgaatttaccctaggtactttgcacaacgatcaaaacaggcacgtttaattgaaaacaatatatcaagttataccatactaacattttctcaattccaacagatatatgggtttctttctgcatataaaattaataaacataagggtaatgttataaatcatatttggatggtttgtaaattcaacaataaatgtactagaaaagttcactatttagtagactcattacatcaaatagttttcattaagttttacggtactcaccacgctacctgtgaacaggagaataaaaagcattgctatccagctttcagaaatttatattcacacggtagtggtcatgatccgattaaagttactaattatttgaaaagggagtatagagattgttatgagtatgttattgcacttggtgaagaaccaacaacaaagattttcactagatgggtgatgaaaattttgagtttttagataaatctgtttataatccatcattaatgagtgattataggtattgtgttgaattaatgaaaaaattttcagattttgatgtgatgttaacaatgaaatataacaaatattgtgagcttggtatagatgaagataacattttgcattttttacgataatcaaaaagatttgaaaaatgtaactgatgatttcccaggtttaatattttcattcaagccattactaaaaaaacctattttatcaaaagatataagttgtggtgttacatttgatttaatcagggacaaaaatgttagaattgtaactttatgttataaagttgatactttcgaaggtaagtaaccgcataactttttaggctatattggtacgttaccatcaatggaaagcaatcacaattttcaaatattctttagggagtttttgaaagtatgcaaaaaagtttttcggagatgatatttcaataaaatgggacaatatttttacatatgaaagtgaagcagaactgaagggtttaagttttaaaaaaaatcttaatattggatgtgttaatgaatgtatgaaagcaatgtattgtttagaggaaaatcaatgtattggtcgtttattagattgtatggtttattatgataagattattaagaaattaaatatcaattctaaccaaggtcttgattgaaaatattatactaaagggaagaataaaacaatgaatgatatgaaaactaagcattataataataaagaagcgattattttccttaaaaagaaaatgttttacgtttatagactattccatacaagggatagatgggcattttatgctagaatggatataaataagtttagtaaggatgctgtgaaaaagtttgtaagttataacaagaagcaaaatcacaagacacttaagttaaagctattgacctggaactttgaaatttttaaagagaagttaatttcccaatatgatatgaacaaagaatttgaaagatttgatgaatataaggtgaaagggagtaataaggtgtataaggatgatagtattataacttcaagtaaggaaattgaaaatattgttatgatgattaattcattctttacaattaatgcaagtggaaatatggatagatatcttaaatatggacaattagaaattcataatttatctaatattgctattttttcaaataaaatcaataaatattttgaaatgattgaatcggaagtaattgggggtgtaaattctataagagttcaatcgattatgtctaagaatggattttccgagggtatagctcgttatagtgatatgattttggatgataggatacatgaaagccctgacaaaagagtgagaatagataaggctagaaccgttgataaagatgattaagatgatgatgattatgatgattacggagataattatttggaagatgcaaagttattcggagatagtttttcaaaattatatccaatgatgaattcaatgataaatccaatggaaaaagattcagattcggattcggaagcggaaggaaaattgacataatattatgtaataactccgtagataataaatagtaaataccggccgtcacagttttaattttgttaattttttaattttttaatgtcctcttaggcaccagccgcacgcggaaggaaagggtcttttttttattttttttctttttccttttccttttccttttccttttcccttcttcattccgagatagatccgtagagactccgagggcggttaatctatgggtcttttactgttctgtatattagagtattgtttatatggaaaataatggataactggttagtatacagtataattagtactatggatataagatattaaattaaaagagaaaataataaccacgttgaagaccatggagataagtttaggatttaggatataggaaatagggtttaatggacataatgtgggataatagaaaatttgatttataatatagccggtttttagtaattgattttttaatttttaattttttctcttttcatttaaatacccttttggaccccttattttctatacgacgcatgctttgatcttatattaaagtgtatttttatatattgtattatattatatcatatcacaagttaatataaatgatgaaaacagatataatggtaccaataacagatattgtagaaactgtttcatttggtcttgtatcaaaattaagaaagaaaactcatatttatgatgatcacgttcaaacaattaaagaaaaagatgaaaatattattgattttaattgcaaacatattactaaaaaaatgacaaaatcaagttcagtttgtaatacaatttctaatacaattgatgaaaattttaatcgtcataatagtgttaaagttaaaaagagtaaatcagaggaacaatttaaacctgaaattataactgctgcttatacatttaataattcattacctatgattcaatcacaatctttatcttcattcccatcatatgattcaaatcgtcaagatgtatttactagatcaaaatctttaaattatacttcaaattattcatataaacgtccaaatgcaattttctcgattcatgatgatgataataataaatttagagaatcatcaaaatcattatctccaactcgttcatcaataccaactccaaaacaaaaacttttatctcactcaatgaaagatcgttttgataaaaattttaaaacttcatcctcaaaaaataatactttaaataatgattatgtcaatcaaagtaaaagaactaactcatcttcgacattaactaatagttcattaaaatctaaaaaatctactggttcaacaataaattcttcagcaatttctcatagaagagttacaattgctgataatgtaactgatatggaaagtggtgaaaaattagctgtaaataataatggtgatgaatatttattatcatcaaatactaatacgagaagatcaaattcaaaaaatttacaatataatgtttataatgatggtaatgaaactgataattcatcattttattcattttctgaacaacatcaattcaaattggttttagatgatcatataacgcccgaattataaaatttcaatgcatacaacaacatcaaagtcttttctaataatctctaatctgcttttccttttttctcttcttgttatatatactagattttctcttttgctttacgtttataatatcatacgtctgtaataataaaaatatattaataattaactattaaaattaaactataaaaatgtagcaaaaatatacaaatgtgattaaattattactaaaattacaaaaattctttatcaacgacaacttcaagtgttggtgaatgaagtcttctaatgttaatttctttactagtatcttcttcttcttctttttcatcttctattgaattatcactttccatatcttcatcatcagttaaggtgtctggtaagaaaacagtttttctttcagttgtattataattctttaagaaatttgttggacctggaatgttccttaaatcaattgattgttctggttcctcttccacttccatttcttctttttgttcttcttcaataaattcttgttcttgttctggctctggcttttcattgacttcttcttcaacttccttttcttgctcttgttcttgttcttgttcatttaattttgtttcaacatcatcatgttgtctgttaattttaacatcatgatgttcttcatcatcatcaattggtattctaatctttcttggactattatttgaactgaatgaattaccatttaataatcttaaattagagaaaatctcggggaattcaaagttattttcccttattgaagattgtttgacttgaatatttttaatttttggaattgaaataatcattgaataaccattagtttaagagtttataattaatattattattaatgtcaatatttgaaggtaatttaatatttttaaaaaaattatctcttgatgatttaataattaatgaatagttttcaatttgttttaatgaataaccatcaaacttattaataaattgataattacctctattaatatttttattaagtagaatataataattatcacagtcttgatcaaattgaatttctggttgatttaatctttgaatttgtctcttctcaatttgttgtttcttatatagatattctctttgaaattgatctaataaacataattcattaatattgctaccaaaagaatttgatggacatgaataatattgtggttgttgtgattgtctgagtaaaaacattagttaatttattgtaatttgacttgaattgggttgatttgtctgttgataagagaaagaaataaacaaggtacaagagaaacgtaaagtggaaaagaaagagaaaccttcgacttaaataggtagcagatcttcatgataaaccttgagctgacaaattccataattataggagttgagccccgtttggaaaagataagaattttctagaagaatttcccttttcggaaggtgatggaattttctggaaggatgcgacatgtcttttgttgtgatggtcctctcttttagatggtttgagatggaatcagtgggtgttgggaaggtaatgggagggtttagatggtggttgtagtgaatgtgtaggtggtgtaatgtgatataggtctagcttaatgatggtgattatagttttatggtgtgtaaatagtacattaaatagtatttgacgagccacctaaaaagataaaatcactgttttcacacattgatcaaattgatttagataatttacaaattattttttaatttctatttacaaaatatacacatacaattaaatactttatacaattatgaatgtaggaaatcagcatttgtatataaatcaagcattggattttcaccagattttgtctttgtcttttcaatatctgcccattgttttaaaaattctgcatgactacaagtaaatgattttttacctgtaatttccatatataattcattcataactttaaaatctgttgggaacattatatcaaaatatccttgatcaaccatataagtatctgtattaatcatattatctttatacattgtttgaactgttggtgaattataacctttaatagttttatcaaattttgaaaaatctgatgttaaaattttatgatttgggaaaaattcttttaaaattttaaataatttaattaatcttgttggtatatattcaggatctgataaattaactctcattggatttaacatatccttaattttcattattggataaaattgatttaatggatgatttttcaatgatttaattgggaatttactattttcacgtaattttaaaaattcttttgttgatgattcaatatctggggaataatattcatgaaaatcattattttcatctattacaacatatccttgatatggtttctttgtatcaatatcatatcttacaacatcatgtgataaattatcgaaaacttctaatgcaataacaaaacatggatcttcaattaatgtatcccaatcaaatatagatttattaacaacttcaactctacttttatgtctatctaatctagaattttgtttattaaataattttgaagaaatttcaataattctatattttgttctattataaatttcaggttcattttttgctaagaaatctaatatattaagcattactgtaccattacctgcaccaatttcatatattattaattctttttcttctcctccatttataggattttcttctttaaatttagataaaatatatctagctaaaccatcaccataatatggttgaaacaattcagttggtgtatgccataattgtaacgaaggtttggcaattttataatcctctaattttgattcttcttcagatttagtttttttactagtattagtattcgtacttgttcttgaagatttcttatttgtactattactactattactactactttcattagatcttttaataacttgaagtgattgaattttttcttgatcatatttatcataagcctgtaaccatttttgcataaattcatcttgaccttctaattgattataatcaaaaggtttatcaggttggaaaattgttgcttcctttgtaaaataaccataattaacattataaagtgaatcatcaataaaatcagatgttaacattttaacacttttaggtttagttgatcttttatttaatttacttatattagttaatggatatcttgaaaatttttcataatttgcatttaaatccattgattcaataccaccttgttcaaaaattaatttaattaaatttgaatgtggttttggtggttggcctttctcttcttctgttggtaacctatgttgtaaattttcagggaaaatagaataatcatgaatgaatgatgttttattatctttattatcctttttcatctttaaaattgccttaccctttgcagatgtatttgaatttgttgaatcattattatcaattgcagaatctttatttgatcttttaataattgatttacgagttgagatagatctttttgtcaattcatttttagagaaacgtatatttcttattctactaaccaacatctcaatatctttaccactgtatctatagcagaccccactctattccatcagtaaagatagatcgatatattcatgtaaatagtggaaaacctatcaaaaagttgcacggtgtaaggatggtgaaaaataattttttatcttgaaatttttcactttgctttgttattgtcaataaggttaaggtaggatatctgcttttgcttggatatatattagtagacaaggacaatagagtatttgaagtatgggtgttcctgcacttttccgttggttatccaagaaatatccaaagatcatatcttcagttgttgaagaagaaggtccaattattgatggaattgaacaaccaattaattatgcagatccaaatcctaatggtgaattagataatctttatcttgatatgaatgcaattgttcatccatgttcacatcctgaaaatagaccacctcctgaaactgaggaagaaatgatgatggaaatttttaaatatactaatcatgttttaaatattgcaagaccaagaaaattattaatgattgcagttgatggtgttgcaccgagagctaaaatgaatcaacaacgttcaagacgttttagatctgctaaagatgcacaaattgctcatgaagagaaacagagagaattagctgaaatggaggcaagaggtgaaataattgatgaaactatcaaaggtaagaaatcttgggattcaaattctattacacctggtacaccatttatggatattttagctgcaagtttaaaatattgggttgcatataaattatcaacagatcctggttggagtgaattacaagttataattagtgatgcatcagtacctggtgaaggtgaacataaaattatgaattttattagaagtcaaagatcagatcctcaatatgatcctaatgttacacattgtattcatggtttagatgctgatttaattttcttatcattagcaactcatgaaccacattttaaagttttaagagaagatgttttcgcaaaggatcaaatgcaaagacaattaacaacaaaggatagattatatatggatgatgaaacaaaggataaattgaaaaatgctaaacaaccttttatttggttacatattaatgtattaagagaatatttacaagttgaattacaggtaccaagattaccatttaaatatgattttgagagagcaattgatgattgggttttcatgtgttttttcgttggtaatgattttttacctcatttaccttcattagatgttagagatagttcacttgatacattagttggtatatggaaaaatttattaccaaaattaaaacattatattacatgtgatggtattttaaatttagatagagttgaaaaattattatcagaattagcaacaaaggaagataatattttcaaacaaagacatgaacaagaaatgcgtagagaagcaaatttcaaacgtaggaaatttgatagagaacaacaaagtattgttcataatcaattattacaaagtgtttcaaagggtaaggataatgcaccaattaatccatcacaaaatatgacattaactaatttatcatctaatacaggaagtgaaggattgaaaatgtcaaatagtgatatagttcaaaatataagtgtgatatcgaaggcaaatactactaataaaagtgttgcagaagttttaagggaaggattaatgaataaggataagacagttgaagaaaaggaagaaaataaaattggtgataaaagaaaaccaattgatgatattgatgttaatcctgaaaatacagatgaaactaatgatgatgatgatgattttaaggatgaagatattaaattatgggaaccaggatataagaaaagatattatcaacaaaaatttaaaactaataatgaagaagagattgaaaaaattagaagaaatatggcattttcatatgttgaaggtatttcatgggttttattatattattatcaaggatgtccatcatggaattggtattatccatatcattatgcaccatttgcatctgattttattaatttaaatgaatttaaaattaaatttgaacaaggtaaaccatttcaaccatttgaacaattaatgagtgttttacctgcagcatcaaatcataatttaccagaaattttcagaaatttaatgtcagatccaaattcagaaattattgatttttatccagaagaatttaaaattgatatgaatggagagaaacaatcatggagaggtaattgcacttttaccatttattgatgagaatagattattaaaaggttgttagatcacaatatgattcattaactgaagatgaaaaaaatagaaatagtcataaacgtgaagttttatttattggtaagaaaaatccatattttaaaaaattttctaaactttatattaaaggtgaagataagaaaggtaaaagtgaaatttcatttaatttcaataaaacacatcttgcaggtaaagttaagccatataaattttataaacctgatgataaatttaagttcccatttaataataatgaagaatataatgatttaaataccaatgatttcttattagcagaatttgagatgccaccaaaagtatttggtaaatcaatgttattaacaggatatagaccacataatccagttttaacacatgaggataaggaaatgattttatatttcagaaattataataataataataatagatttaataataatagaaatcaagggaattaattcaacaaatattgattataaattacatacaggaccatatcagaaaagtatgtattcattaagagctggtggatatcagtatttcttcaatatgtataatcaagaaatgaatcatcaacaacagacaatgaattataatcaaggtagaaataatttcagtaatgcatatcaaaataattatgattcctatgcatcacctaatgaagggtataataattataataataataataataattataataatggttataataacaatggttataataataaccgaggaggatacggcagaggaggatacggtggcagaggaggctacaacagaggtggatacggtagaggtagaggtagaggttattagatattaatattgaatataagaaactgtgtaatcttagctatgttaagtgaaaaatttatttatttatttatttatttactacgcgtaataagtatctctatctcttcttttagtatggataagagtgtgttgtttgctgaacagttgacggtgagagaggatagtagtagtaggggggatggtaatagtagtaatggtcatgatataagagagttatctaagaagatcgataagtatagacagaataaagttaataaaccattaccattacgcgtaagtagtattaacactacaaacacgttagagaggttaagtttattaaatgataagaagatgaagaaacagagacaagatgggaataatatggttgataataagtttaagaaaataccacaatcaactaataaacctgataattataactatattaacagatgataaattatcaattcaatatgagaaaattattgaaaatgcacgtaatttaacaacatatggtatattgaagaataatggtaaaactatatatgaggatcaattaattggtaaaattgataaaatacagataataagtgattcattgaaaattataatagttaactgatgatttaatggataaatattggaagattggaattgtttgtttatggaatgaatggattgaaattaataaaggtgatacaatactgttacctgatattgatttaaattctaataatgaagaattacaatggagttttaaatggaaaaagattgtttcattataaaaagaaaaagagaaaatgtatttacagagggtagtatttatacttatacttatactatattatgagttttctcatataataattcagagaatctttgaagtgattcctttatttcaatatttgaagaattttcaattaatggataataatcattttcaaattttgaacatattacaccatcaccacaaattgatataaaaggtaatgcagcatttataattgataaatcatttctattgattgcattatctaaaactttaaagaaatgaatccaattagtttctatttgcataaattgttaataataaaagatcaattttatgtttaattaatctttcatcatttaatttaaaattacataattgatttgataaattatctagtgaattaagtaaatttgaatgagtaaataaattttcttgttgaatattaaaagtatttaaaattttattcaatgttaaaaatgaattatttgtaaaatttgaacatgaaataattaataatggtaaaaaatttattatttcatccttcgttaggttaattctataattttcaagtatatgtaaaagaaatttattttgatatttaaaattatcagtattatttttaatattaatattttgatgaaattcagttgattgtaatatagtttcaaaatatgatgataatgattgataatttaatgtaaaacctgctttataaattttatctaaaaattcacttatatgggaaagtgggaaattttcatgatcaactaaatgtaatttaagtagttttctgaaatgattattataattatctgaagttaaatcaaattgattgaaagtaggagtggtatcactataatttcttgatgaagtatgataatatctaatacctctaaatatattatcatcattattgaaagaattatttttcttcaaatattttgatttatctaatttatttgaccataaatattctaaatttaaatcatttcttctatcatgagttaacatatgaatgataataccatcagttttagtatctgtcattacccaagtatttggagttacaccataagtttgcttttgaataatttggagcagttttaccctttttatttaattttctatgatattttgctaatttaccagttttcaatataccttcagttaaaggtaatttatgtaaattatgtttaatataaaattgtaattcagatgatgctttaagtaaatgttttgatgatttacctgtacctaaaatcataaaatcagcaatatcatgagcaccttcaatttcagatgaaatattttcactattagagatagaatttgaatttgatctcatatcaaatataagtaaatcatagatacctaaatcatttgcaagaaaatgagttaaattttccatagtcagaggataatttgggggcatttcaggtatttctatagtatttaaaggagatgaaatagtgggagattcatttggattcaaataccatggagtatcattaagtgaagatggagtagttgagaaatgtgaagatgacgatctgaccaatggcaatacagtccttcacaccaacagacagagaccttacaacccttacacagttaacagatctagataacatccctgcttattaaaagaagagagaaagtaagtgtattaataaggcctgtattaataaaccaagatattaatcagccaaagtggaaatcgagaactttcaattttctttctctgctgggtatttaaatatcaacctgtttcttctttttattacttctcttcattctttatgttctttagacaaaagtaacttctatcaacagtagattatctctattatcaacaacaagaatggttcacaacaaagtcactattatcggttcaggtcctgccgctcacactgccgctatctatttagctagagctgaaatgaaccctgtattatatgaaggtatgatggcaaatggtattgctgcaggtggtcaattaactacaactacagaaattgaaaatttccctggtttcccagatgctttaacaggttctgaattaatggataaaatgagagaacaaagttctaaatttggtactaaaattattactgaaactatttcaaaagttgatttatcttcaaaaccttttaaattatggcctgaattttatgaagattcagatccaattactaccgatgctgttgtcattgcaactggtgcttctgcaaagagattaggtttaccaggtgaagaaacttattggcaacaaggtatatcagcttgtgcagtctgtgatggtgcagttccaatttttagaaataaacctttagctgtcattggtggtggtgattctgcatgtgaggaagctttattcttaactaagtttggttctaaagtttatctgattgtcagaaaagatcatcttagagcttcagttattatgcaaaagagagttgaaaaaaatccaaaattagaaattttatataatactgtttcattagaggcaaagggtgatggtaaattcttgaatgctttatcaattaaaaatgttaaaactgatgaagttaaagatttaccagttaatggattattttatgcaattggtcatactcctgcaactcaaatttttaaagatcaattagaaactgatgaaactggttatattattactaaacctggtactgcttcaacttcaattgaaggtgtctatgcagctggtgatgttcaagattctaaatatagacaagcaattacttctgcaggtaccggttgtatggctgctctggaagctgaagcttatcttgcatcattagaatagatgtagtagtatatgtatagatatagcacatcattttttatttatttataatccttattatagttgtataatataaagataaagaaacatttaaagtatatttaatttaaagtagtattaaaagatgaaatttttaacatgaaatttttacctaataaattattactatagtagacatacaccatttctttctagtacagacaacgatatacccctataatacaatgaatttaaacgtcaattcactccctacagagatactgattgttatattatcatatactgatccacttacattagaaaatatcccccttgtatgtaaaacttggtataatatacttaaagatgatacaatttggaattcaatttttaaattacaattcccatttaatagtcaaattttcccatcaatttcaagatcaaataattataaaactgaattaataatacgtagtcatttaattcataactttaaacgagggaaattattgaataatcattataaaattaatcatattataactaattcatcaatttcaattgattggtttagaaataaattaacaattattgatataccaagggatacaataatttcatttgatttaagaaatggtaaaagtcaaaaatttttaaatgatttccaacctcaaggtataacaagttatgatgctggtacttcatcaaattcaattttaggtagtagatgtttaattttcggtagatgggatggttcagtttatggtgccttaattgattataaaggtttgattttaagtgatgtacataaatggaatgaagtttcaaataatagaattacttgtgttacttcatgtttaaatatttcaaattctattaataatatgactattaataataatactaatagtatgaaatttaataattatattgataaaattaaaataactaataatgatacctctcataatcaattaattaaatcaggatcaattggtgcttttagttgtgatgaatcaggcatgattttcggttgggatataagaaatggtgattgtctctttaaattgaaattatttaatgaaaataataaagttattaaattacagagtgatggtaaaacaattttaatttgtttattagaaaatggtgaaatttgggtaattaaaaatatttttaaatctttaagggataattcaattaaaattgaaaaatttaaaattggtattataccatttgatagatataattcaattttattaaatttatttgttgattatggtaatgaaactgttacaatttggaatgaattaaatttaattatttattcattttcaattgataatttattaaatttaaatttaaataataaattaatttatgaacctccaattgatacattaatttcatcagttatatttgaaaataattctaaaatgtttattaaaagagatttaaatattgttggtagtgatcctttattagcatcaattgttctaaataatggaattattaatataattaatattagagaaacattatcaacacatttattaaaaccaattaatttaaaaccaattatggcaaaatttttaatggaaaatgatcatataaattattataataattttaatacaaatttagatttaaatatttcaccaattgcatcagtttcaattaattcagttttcattgcaattgcaagtcatttaggtaaagttgaaatatttgatttaatgacaggtgaatatttaagaactgtaattgataaaattggtaaaaagaaatttcaagaattagagaatataacaccaattagaattttcaataatttaattaaattatatattgatgaaaatttaacaagaggtttattaataattggtaattatttacaatatttcctttgtggtaattccaaggatgataataattttaataagagaaatgataaaaaatttaataataagaaatttattgataaaaagggtgattcaattcatgatattaaagatttaattggtaattatcaaattgagaaagatgaaaatgataaagagaaacaattattaattaaatataatggtaatacagatgtaattcataatgatgaagatgaattaaatttagcattagttatgagtttatcaatgaatgataatagtaatgaaattgaaaatagcagtgaatttaaccctataaatgatgatgatcatgatatggatgaagatttaagattagctattgaattatctaaagcggaaaattatagagaaattgatgaagaacaatgggaagaatttatataatatataatataatataatatattatactaccgtacaactgattcagatttgaaattttatacttgtaaaacctatattatcattatctaattgatttgaatcaaaattatttaaattaattggtgataaaatttttaaacctctaacatgacaatctttaccattttgatgatttgaaataaatttaatttttaaaatataacattttaataaaccattattacaaatattttggaaattaatgttttgccaaccaattggttggaaaaattcataatttaaaacttcaattaaatcatgttcaccactaccagctaaaattttaattttttcaggtgtataactttcatcaattgaataattagataaaatgaaatcatactaatattaacacatttagtaaatttaattaaaagataatgtggttgtggtccatcactttgccaataagttgaaattaaatcatcccttaatttattaatttcactaccttgttttgatgatgaaacttcacatgatgctaaattacttatatcaattaaaccttcactttccatctcttgaatacctcgaagataaattacttcctcatgatctacactatctacaggttcttccattacgttaattacacttatctatactatccctacctaaagaagatagatggtgcctttacttaactaaactgttgatgatgataatttcgcgttaaagtattagtatattattaagtagtatttatataaagtttataaagagtgcattatattatattagatattggagggtatttatttttttataggttatggtatggatgactaactgttatacatctcaccaaagatattataagttgaattcaattaattggtttaatctttcaactatattgtttaattcatcattaatgataatttcatcattaatctttggtaatgaagatttaacaataattgatgattcaatagtacttgctgtggtattaatgttaacattattggtattgatattattattattattattagtattagttgtaacaattgatgaaacagtttctgattgttttgtagaattatctaaaaatgggaagattttttcaaataattttgattctaataatgaataaacttttgaacttggttgtgtttgattaattaaccaattatttgcaaattcaattttatctgaatctaatttattaaataatttattaattaaatgaattgataaatttttcaaatttttagtccattttgaattaccattatcatcaattataatatttaaaatttctgattttaaatttaaaatattttcattatttaataatgatttatctaaattattttgaaaaattaatgttttgtataatattaaacataattttgtacaaattatatgtctaatatcagctcttaataataataatcttgtattatcaaaatttaaactatttgggaattgacgtgtcatatttgaacatgataataaatttaaaattgaataattaagtatttcccttgaattataatttttagattttaaattatttaaatttcttttataccaaataattgaatttgtaaaattaattttattacgtttaattgcatttttaaaatattctttttcaaatgaaacagctgatgaacataataaaggtcttaaaattctaatttgatgatttgcaacatctaatttcattgcttcaagtattaaaaataatgttttaaaaccttcaatcaataaattaatttcaattttttcattattacaagatttatgaaataaattatttaattcatcaacccaaggatctctcattggagcacaatgtaatttaaaaattgaacaaatccaatttgaaaaattaataaaattaaaacattttgaatttaattgttgagttattaaactaatatccattatttcttcaatttgaattatatcttttgcaggtatcagactaattaaaatacttttcaaacattgaaacattacaattattggagaattttcatttaaaataattttattatctaaatcattaattaaattttcagtttcaattttaatcatattccaataattatcagattgatttttctttcttttacctctttcaccatctaaatttggtctaaattgtaattgaggatcaaataaaatatcatgtctaagttgaggattttttaaaacttcttgtaaatcaatttcatgcattgaatgtaaatttacaggaggtaataataaagatggttgttgttgatgttggcgatagtgatgatgatgatgatgatgatgactatgatgactatgatgactatgattatgttttggttttgatatgttattatttgatatatttaatttgttgttcttatacatatccaaaaacatttgatgtgaatgagtatttggataaatatgagaattttttgaaggtatgaaaatatttggtaaagattttgaacggaattttttagttattttaacagattttcttgattttgaagaatttttttttgaaattttattagaattatttgatgattgtaaattattaataatattattatttggtaaattaagcatttggaaattagatataaattgttgattaaattgtatcacatttttattaacattaacattattattagtattaatattgtcattattaatattatcagttaaaatagtattgtcactatttgaagaattatctaattgaatatctatatttgaatgagtttgacttaataaaggttttttaatttcaatttgagtatcttcaatttttgtctttggattattattattaatattattaatttctaaatccaattcaatatctgaattatttaaagaattaacatcttgaagagaagaatttgcagaaggaatattattattatgagcagataaattcatattatgagataatgaatgattatttttaacattaattacaaccaaagaaggtcttctactttctgaagtgactatattatttgtattaatatgattttcaggatttgatgaatcatttgaattaaagacatttttaaaatgaggaggtctttctaaatcttgatcattatttgaattattaatatgattaagcatttttgtgagtaatataatataatataatatattaatgaatgtaaatttgcaatgtaaatgtaaatgataaatcaaaagaaaggggtgtgtgtgtcttaatggaggaaaaaagggggggataaggataataatttataatagttttgtgaaattaaatgaagtagaataggataaagatgtgaatgtagagtagtgaaaattcggataaaaaatgtcaaaggggtgtaatgataaaatgagtaaggatataagcctaaaaatggaaaaaaaagtgaaaatgaaatgaaaataagaaatgaaaataagaaaagccaaaaaataacgttgcaaaggcaaaatttgagagaaaaagaaaggaataataacctgtgactaacctgaatcgtttctttttttcttacgtaatgtaatgaaatgaaataatagtagcttcgagaaatgcgagattttcttttttcttttttctttttcctaagggaaattttcaaagtgcgggaaaattgtctttccttctatttcctcttactaatgagttattattgtgatttcactggatcagtatcaagatctgtattgatattatattctggttacgtaattgtttaattatgctgtatttatactatactatactatattgatatagatatagatatggatatagatacaatagatacaatagatacaattgacggtatgtaaaacaagaagagaaatgcaaataagctctgagaagaggaagaaggagaagggtgtaaataaaagggaaaacacagctgagccaattagttagttattcactaagaattacgctgagccttaatattattgtgttgagccttcttaatattacaaattattattatattatcatcaattatcagttatctattatctattatctattatctattatctatgattatatactctacttcacttcaacaactcactccatgtaatctcttttctaactgcattactgaaaccttcatgatatttaacccatatcctctcttctttactctctttacctttaccttctcctttattatctttcttatctcctccaaaattattatattccctttgaaaatcaacactatccttatccttaaatatcccatccccaatcttatgtctcttattattattataattatcaccttcaccaccttcttcaatctctatatccctctctctctccctttcaatctcaatattcctctttctcattctttgttccattattccatttataatttctaaatatggtttactaataatttcaagtttcttaatttgccatttttcattaatatcttcaactttactatcattaactttatcaatatcaattaatccttcaattatatctggtttcatccttatattacctccattattaccattattattattattaaatatattattcttttcaatctttatctcaaattgtttcattatctcaattattctatcaattttaactctctctttatcaaattctttaccactattaatactgctattattattacttatattatcactttcactattactattattaattaataatcgtctcttttcataattcggtattaatatagaatttaacatagatatctcactatttaccataacactatgatttatcttaccttgatatttcttaatcatattgttaattaatgaattaacattccttttaacatcaaaattttcttcactcttaaattgatatttaaatttattattattattattattataatgattattattaaaaccaatcatactaccaccattactattaaagttagaaaattcttgaaaatattttaacgaaacaattgaattataagtattactctcatcttgtgtcattttttgattatttaaattaatcaaatcttgaaaataattccattctgatattttatcaagtttatttaaatcatcctcatattcctcatgaacttgtaataataaattaaaacatcccatattaattttatttaaattattattactcttatttaacttttcccttaatttattgaaaatttcattcttaccaatcttattattagtaaatttattctctaaattgaaaatttctttaataattttaaaccatattatatcaccatccttaattctattattatttaaatctttagtattaaattgtaaaaaattaatacaattacgtatatcaccatctaatgaaataattaaatcatctaataatgattcattaacatcttcaatattttcaacttttaaaatttcctttaaccttttcttaatatgttttttattacttttctgaaaattaataatttcacaaaatggttttaattgttctaaacaattagatccaatatcattacacattgcaattattggtctcttaattaaatcatccattttattatattttaatttaccaaaattatttaattcatcaacaacttttttatccttttgtaataaattaactaatattttaattataccattctcattacccattgctccatcaatttcatctaatactaaacaaatatttttacccgttaaactcctcatttttaaagaatttttaactttctctctaacattaacacctgatctatcatcacttgaattaatttcttgaatctcaaaatttaattgtttacaaacacattgtgcaattgttgttttaccaatacctggaggtccatgaattaaaatcattttcttacgtggtcttttaaatggatcattattataattattatcattattattattaatatcattaagtctaatcttacctccattaactatatacatccattcatttaaccatttaagaatattagcattaactctttcattacctaaaagatcaataaatttctttggtctatatttttcagtccataaagtattttgatttttctttctatgtttcttattattcttacttgttaacatttttaattcattaatatttttctttaattcatcttcattttcatttaatttacttaattccttttcagtattttccttaatccttattttctcatataattcattcatatttaaacattctaattgtttactaccattaattaaatcattaacaatatcacgttccttatttaacattaaaatatttttcggcttaattgtaattctttcaccattagataatgtaaatttcctatcataaataacagtagaattatttaataatacatttttcttctccttgttgaactagagaatgcaaaacattggatgcttcacttgtacctattgaaaaatccattacttttcaaaagaagtctttggatgtatataatcgttcaaatttcaatttcacactataacatttacgcgtcaacattggaaactaatttatttaaatgtacacgaattacatagtaaaagtagagtaaatataatataattacaaattgtaaacttagaaacagaagacttgatcatcttgttttgattgtaagacacctttttcccatcctaattcttctaagtattgtaacattacctttttcatatctaatggaccacaaatgaaaatttttgtatcattattaacagttggtaattctttttctagaatatcctttgtaatataaccagtataaccatcttcccaatcctttggtggataagttaaagcatatttaatatcaaaatttggataagatttaacatattcatctaattcatcctttaataaaatatcattttctgtttcatttgcaaataataatttaacattagtagtatcttcaggtgttgtaattatattacctaaaactgataacattggagtaatacctgaaccacctgcaatcattataatattttttgacatatttggtttatatgacattctaccaactggacctttgaataaaacttttttaccaggtgttaaggaagcaaaatatttagaaactttaccatctttataagatttaacaattatatcgaaaaatccttcatcaaatttatttgaaattggtgtataatatctaatttcatcattatcattaatattaactttacaaactaaatgatgaccaattggtatatttaatttatcataatcatgatctaatttaaatctataaattgcagaatttttagaaataattgttttatcaattaattcatattcttgaaatttatcctttgataaaacaggtctttgaattttaactcttaaaatattaaaacctaaaaataatgctaaaattaaaaccatataaggtaaataatcataatttaaaattgaaataccgaataaacataagaatgttggaatatagattccatgtaatggagtcttaagtaaatctgctccttcaagtttagccattgtgctgtattctggagagataaacaagaaaagaaagacaaaagtagaaggatgaaagtgttgattaataatgaatacagtataataataatacaacagagtgaaaaattatttttattacgtaatattgtacatgttttgttatgtaacttgtaacttaacttaccaacagtaaatgaatggttttttttattacttattaattaaatgaaatgaaatatataaggtaaagcaagtaaattaaaaataaactaaactaaaattaaatgaacgaattgagaatgtaatgttatattaggaaataaatcatttattcagctgaacttgtatctggaacttctttaacaatttccttttccattgcagccttttcagcttcttgctttgcctttaaaattgctgtccaaccatatttagaattttttcttaatctttcaccataaattgagaaaatccaaggaactggaaccataactaatgcaataaatgcgaaaactgtaaccccccaataaatatgtaatttatgcatcatttgaactgtaaataatgggaaaactgatgaaacaacataacgagtaacattatttgcagctaatgcagaagcaacagaaattggtggataagccattgaaaaataagttaaaattgaaaagaaaattaaaactaatgaaaatccaaataaaacacctgatgcagttggtgccatccaatgaacactagttcttgcagtccaagctaaccaaaataatgatggtccaaaagttaatgaaccaactttacaaggtaataatcttgattcaggagttggaggaattttattaccatctttatccttcataccaatataaccatcatcccattttttaaagaaaataaatttatccatacaaacatatagtgatgcacctaacagtaaacctaaaccgacacctaaaaatggtaaacctgaaacacctgttctcatttcatagataccaacgaaaataattgggaaagcttcaaagaaaccgaataaaactgcgaaaacgaatgctgtataaattgagaaaactaaaacaattggttcaactactaacatttccattggttttgctaaagtaacaattaaaattgatgtaataaattcagacaatgataatgtttgtctaatttttttacctcttttaatcaaacgtcttctcataataattggtttataagtttcaggcattaaaaataaaggaccgaaaacagcagctgcaaagaataaattaacccacattgcccatttaagagaaccgacatgatttggattatctgaagttaaattttgaccaataaaaccaccaataattggaccaataacaggaccagctaatggagctaaacagaacaaagtcattgcaataccaatttcttgaggtttccaaacatcagtaattgtaccaccagcaattgctaaagcacctgaagatgttaaacctgcaaagaatcttaaaactaaaacatttctaattttatttgataaaccaacacccataatgaataacattgaaacaggtaaacttgaacaataaacgatttttctaccgaataattctgacagaggagcagcaattgttggaccaaatgccaaacctaataaataaaaggttaaacctgctaaacctaaagtttgactaatatgccatttaaccatcatttcaggaattgcatcaacataaattgatgaaccaagagtaataactaaacaaagaaaagcagttgacattgtacaataccattttctcaaaggactccaattaaatggattatcaggatcatcaggagaatcccaatcaacttgtcttggatcataaccaataatttcaggatcttcagaatctaataattgagattgtttctctaaatcagtattatgagttaaaactttactcattttagaaattgaagttgcagtacgttctaattctaattctaattcatcattatattcatcatttggatttcccaatgttttcttttcaaaatcttcagcatttgtaaatgaagtatgagatttaacagtaattgttctttgtaaatcattatgttcatcagctggagttggagatgatggaatataaggttgagtttgagaatcagtatcaatatttttatcatcattatcaattgtatgattaatatcaatattatcatctatagcatcatcaaaagattcaacagccgattcatatcttgaatttgaagattctgaattccttgaagacattttgaattctttggtattacttaattccaaaaagaagggtaataataaggaattattaattatcaataactgaagtaaaagaaaggaactgatattagggatgtcagaatataaaagataaacattggcaaaaatttattattcaatatgtcctcggagaaattatagtgatgaaattttcaaattgtttaggtgtctcggcaatttttcggtgagtaagtttttctaactgtgttttgttttatattattttgttttgtttgttttcggtgtattgttttaccaacatataatttaagatggtggttacaataagtagagtggtaaatattactaagggataatagaatgcattcaattgtaattgaagactactagtaactaatagtaactaatataaaacaaactactagtgcaattgtcggcaaaaccgataataataataataataataataataaaataataataatagtaataatattgataaaagctattgtttaagcctcgtttaagagaaaactaatagaaaaagaaaagaaaaaaatataataataccaatgattacgtaacagtcacgtgacagacgcgtctattaagtaaatgattagattacataagaatatgcttatgtaatagtgtgcgctattaatgaagagaattaactaatttcacgttttttcagagttcttaaaaatgcacatcattaaggacttaagaccctttcttttatttaagatctgaagtataccttatcatcattatatttataagatcaattaattaaacaaagataataaagataatatggttagtgcagttgatttaattaaacaaaataaatatttaatgttatcaaaatcatggtgtccagattgtcattatgcaattagagttttccaaaaatataatgtaattaataaagttaaattaattgaattagataaaatgaatagtaatgaagcattaaaattagagaaagaatttactgaaatttcaggtagaaaatgggttccatcattattctttaatggtaaattttggggtaatgaaagtgatttatataaattagagagtactgattcaactgagaaagttttcaaagaagttggtttattataataataataattatacttaggattaatatagattatgtaatgtatttaaataaatgattatgtaatactctataataataataataataatagactttaacaataagaaaactattcccaaaagggaaagcgggggtgtaataaaagcaataataataagccttttgagggggtgaattattaatactcaatatacttaggataataatgttcataatccgataatcggtgatgtagttagtaataacagtaataataactccattacacggagaaaagattattactataataatcttataaccattaataactataacaaaccctatcctccaatccgtgttaaatactccacgaagagtagtcaaaatttagagggactccgagtactactatccacaacaagtggcagttaactccgatattaagaaatttttatttcaatgacataataacactaagtaattgagatattcttttctctttatcgatatgcacaaccccactactactccgccctagggggttaatttagtttttcaattttgttcgttttatgttattattatagctgttcatttcaattactaattgtctataaatacaactgacaccccccaattaatcaatttatataacttatctttatcttatttatctcttttatattcctttcttgtaatttcttcttcttttatcaatcaagaagtacttctgtaaaaaaaatgttaagaactactacaactaaagttaatttattaaaatctttctcagtttattcatcttctgctgcaagattttattcatctttaccattatctcaaacaattactttaccaactggtcaaacttatgaacaacctgttggtttattcattaatggtgaatttgttaaatctcaacaacataaaacttttgaagttttaaatccttcaactgaagaagaaatttgtcatgtctatgaagcaagagaagatgatgttaatttagctgttgatgcagctcataaagctttccatagtgaatggtctaaatgtgatcctgcaattagaggtaaatatttaagtaatttagctgatttaatggaagctaataaagatactttagctgcaattgaatcaatggataatggtaaagctttatcaatggctcaaggtgatgttggtttagttattaattatttaagatattgtgcaggttatgctgataaattatatggtaaattagttgatactggttctaattattttaattatgttaaaagagaaccaattggtgtttgtggtcaaattattccttggaatttcccattattaatgtggtcatggaaaattggtcctgccttagctgctggtaataccgttgtcttaaaaaccgccgaatcaaccccattatctgctctttatgctgctaaattagttaaagaagctggtattccaaatggtgttgttaatattgtttcaggttttggtaaaattactggtgaagcaatttcaatgcatccaaaaattaaaaaattagcctttactggttcaactgcaactggtaaacatattatgaaagctgcagcagattctaatttaaagaaagttacattagaattaggtggtaaatcaccaaatattgttttcaatgatgcagatgttaaaaaagctgttcaaaatttaattgttggtattttctataattctggtgaagtttgttgtgcaggttcaagagttttcattcaagaaggtatttatgatgaagttctggaagaatttaaaaaagctgcagaacatttaaaagttggtgatccatttgaagatggtgttttccaaggtgctcaaacttctcaacaacaattatctaaaattttatcatatgttgaatcaggtaaaactgaaggtgcaactttagttgcaggtggtgaaagattaggtaataaaggttatttcgttaaaccaacaattttcgctgatgttacaccaaagatgaagatttattcagaagaaattttcggtccatttgcagttgttactaaatttaagactgcagatgaagcaattgaaatggcaaatgattcagaatatggtttagcagcaggtattcatactaaatcattagatactgctacttatgttgcaaataaattagaagcaggtactgtttgggttaatacttataatgatttccattctaatatgccatttggtggttttaaacaatcaggtattggtagagaaatgggtgaagcagcatttgaaaactatactcaatggaaaactgttagaattgcagttaatgatggtcctcaataaattatataattttattcaaatttattcttattctattctatttaacttgaaaatgaaactccgtgtataacttactattattttacttattaacaactaatgaagcttatgaaatgataataattataattataatcatagtaaatattacgtaatactccaaacacggctcaaactaccgcttttgttttgttttgatttcgaagcgcgaaatgtaaacattggaaagaaatttttattgtgaagcttttcgatgtgtttgatctggaggtaaacaaacgtatcattatatatctacttgtgtttgcaaattgtaattgtaattagttatatctgtattgtctttagtatccgaatttgaatgagtgaagatacagtcccaataacattgtctccgattgttatggatagagtgttttcaagttcaactttaacttctaatatgtcattctcagatgatcaaaatgataatgatcaaaatgattataatgataatgattaatgataatgataatgactatactaatacatctttatcagatgatcaacttgatatgcaacaattattaaagaatttccaagataatgaaccaatatttgataatgaattattatatccaactccaaaagaatcaataattgttcattttaaagataatcaactaattactggtacagttgaatctttaataacttatatgacatcaccatttatacttaattatcaattcttaattgattttttcttaacttttagaagttatattgattcattaccacttttggaattattattatgtagattatcattggtgtttgaaaaaatctttaagtaatgatttaaatgaaatggaaattggtaaattagttttaattagaacttttgttacaattcgacattggttattaaatcattttcaagatgattttattaataatttaactttaagaacattatttgcaaatactattaatgaattaccaaaatataaagaatttattggtaatggtaatgaaatttcaaatttacaatcaaaaattattaaagatttaaagaaaaattatttaactttatcgaaaatttattggaattcaaaaattgataatgttgaagatattgaatgatattttaaattataaattagtcttcttatgaagattttgataattcaagattatcagttttaggtatttctcaattatatgatccttcaagtagaagaagtacacttttaaatatgttagaaaatccaaatattaataatagtcaaagtaatttattaaatgattacatcggacagagaaaatccattagaaaactatttgaagagacaaaatagacaaaataattcaagaatggaaagaaataatcataatcgtaataatagtagaaataataacaatcataataataataatgaaaatttgaattttatttccaaaagattcaattaatgcattagacttgaaaaaatttaaatcatcatcaacaacttttgatagttcaagcatcgatcaattatattcatcgataactgagagtaattctaaaaatggatttatttcattaaataaacataaatctgggtcattaaatttgaatggattttccataagtggtaatattgaaattttcaatgatagtaaaataaataaaattgaatcattagttaatgaattacctaaaaggaaagttaataaacccatggaaaaagaatctgaacctgaacttgaaatgaaaaaaactaaagtggaaatcaaaactttgaataaatctaataaagttgcagatattaaggaaaatcaaaagaaaccaaaaaagaagggatttttgaaacaattattcacacataataacagtaaggatactaaggaaaataaagagaatgaacccttaattaaacgtaaagaaccaatccaacaaaaacctataattaaagggaataaatcacctaaaaagccagcaattagtgatatgattaaagatttagaggataaaattttaattaatgattccaaaattgattatttagaagaaattgtgataagggattataaaataatgatatcaaaaccaaattttagaaaacgttattcaaaacaaattaaaaattctaataggaaaagtatactttcaatgggatttgatttaactgataatgaatcaaaatttgatccaaatgattcaccaattaaaattaataaaaataaatattatgaaggacaacttgaaaattcaatgaatattagacaaataaatcaaaacacagttaacgaagaattttcaagagtaaataatgaaaatgaggttgaagaagaagaagaatataataatgatgagaatcatcaagatgatgtaaaatcttttcaaacacctcctaatacaaccaattggtcagattcaatgataatcaacgattcaactaatttaaatactaaaaatgaatttattgatatgggattaattaatagaaattcaacaaaatcattatcaagaccaaataccaataccaatatcaggaaaagttttcataatttaccaaattctacaactatttcaacatcatcaaagagaaataaatataacagtgatccaaatttacttatgaaacagacaataattaaatctggttttataaatatacttaattcaagtgttaataatacaaatataagttatgaaagttttagttataattatgattcatattcattgggaactggagtatttgcgaataatgttaataatttcaataatcaattaaatattacaggaaataataatattagtaataataattcaagtactgctcataacagtatgagatactcagttaatatcattggtggtagaaatagtatagtttctaatagatcttatattacttatgattctgaatttagttcatcttcaaaagttttcaggaataacaataataatgaatttgataataaattacgtaagaagggtgctgttttaaatttaaggaatgaaaatgatgatgttataaataatgatttgaataatgatgtcaatgatgatggttatgaagatgaagatatttctaataattatgataatgataatagtttagatgatgagtctaatctggaaactgaatccaatataaatattgataatttaaaatatattcaagaattaccttttttcgataaataatattgaacaaaatcgtataatcaaaaaatctggaatatcaattttaccatcaccaactgcatcacaaacatgttataatgatttttcacaaaaagatataaacgaacttgccaatttaccagatgagaaaataaatgatgatccattaaattatacattaagtaaattaagaggtgataggaaacaaccaactgttataattggtttaaatgatgatgttaaattagatgaagcggaaattcataggaaacatgcagttgcagttgtttgtcaatcaccaacaaaaaagcaaccaataatgagtaatattaatgatacattacatgattattatcaatcatccgataatgatactaatgaagaaattatattagagaatcgaattaaagatttgtatatatctgctaatccaaatgatactgataataggagaccatcgttatgttcaaataataaattagaaatgaatatgatatcaacacaatcatttagtaaaatgagagataatggtagtatacatactaaagttagttcaggtaaattattaagaaatgatagtgaaagatcaatgtttgatatacaatcattatttgcaactcctaaaggattagataatattacaccattaattccaataattgatgttattaataatgaattacatataccatttattttcaaatatgattcagatatattggcaaagcaaatgacattaattgaacgtgatattgtatctgaagttgaatggaaagaattaattaacttaaaatggaatcaacctttaacaccatataattcatggttaaaattattagttgatatttctgataaatcaggattagaactaataacattaagatttaatttagttaataattggattatttctgaagttttattatgtaaaaatatcattttgagaattttaacaatcacaagattcattcaattagcaattaaatgtcgtgaatatcaaaattatggtacattatttcaaattatgttagcattaaattctgatgtaatgaaagaattaaaatcaacatggattagaattgatcctctgacaattttgaaattcaaagaattaaaagatttaacatcaccaattaataattttaaaaattatagagatgaaattgaaaaaattaaaccatcaaagggtttcataccatttttaccattatcattaagtgatctaacgatgtattctgaaatgccaacaataataagttccaataatggtgatttaagtacagaattagattcattagatggatttggatctgaatcagtaattaattatgaattagttaattttgaaaaatttacaattacaggagagacagttaagaaaacattaagacatattgagtggtctaaattttataactttgagaaaaatgatgaagttatatctaaatgtttatacattagttcattaagtgaagaagatatggagaaatgtctaattgaaattggtgataataatgtgtaaattgtataattgtatagtaaaatagaagatatcaatgttaaggaaaaccgttagaatttcaaatactcgccttattttttgtaaaaaatgtattgtacccagtggtgtcatatcgaagagcgtacctgctgagcatcgattttagatcagtggtgatttgagtactcgtctgtgataattaataccttggatcaaattatagggaatcaattggagttgattatattattagaaaaaagtttttatttgtcagattggtgttttgtgtaaaattaagattaattagtatactaattacagcatatgaaatttgaaaagggaatacgttgttggataccggatccaacacttggttgggttggtgccaatgtagaaaaagtggaatacgatggtttaaccaaaaattataaaattgaattagtttatgatgatgataatagtaaaaaaattaccatagaaacaaatgatttaacggagaataataagaaaataccacagatgaggaatttagatgatacagttgatgatttaacaacattaccacatttgaatgaaccatcagttttaaattctgttaaattaaggtatcagaaaaggataatttatacagttttcaggagttgttttagttgcaattaatccatttgaaagtataccgcatctttattcaagagaagttgttttaaaatatcaaaataaggataagtcagagaatccaccacatgtttttgcaattgctgatgaagcttttaaattaatgaagaaaaatcaaactagtcaatcaattattgtttcaggtgaatcaggtgcaggtaaaactgtttcagctaaatatattatgagatattttgctaatgtaaataatgaaaagaattcatatgaaacaactgaaattgagaaacaaattttggcaactaatcctataatggaagcatttggtaatgcaaaaactataaggaatgataattcttcaagatttgggaaatatttaagaatatgctttgatgagaaatacgttatttgcggagctgagataaaaacttatttacttgaacgttcaagattagtgttacagtcagaaggtgaaagaaattatcatattttttatcaaatgattaatggattgtcagatgaacaaaaggaggagttatcattgacagattgtgaagattatagttatttatataaagggaaaacttcaactgttaaagatgttgatgataagaaagaattcaaagagacatgtgatgctttgagagttattggagttgatgatgagagccaatttgaaattttcaaagtacttgcagctttacttcatatcgggaatatcaaaatagagaattcaagaaatgatgccgttttatcaacggatgagcctaatttattacttgcttgtaatctgttaggattgaactctcacgatttcagtaaatggattgttaaaaagaaaatatcaactagatctgataatattgcatctaatttaaaatatcatgaagctatagttgcaagagattcagtggcaaaatacatctactcattgcttttcaattggttggcaagttatatcaatgcagatttggcttcttcaactgtgaatgaaggtttcttcataggagttttagatatttatgggtttgaacatttccaacataattcatttgaacaattctgtattaattatgctaatgagaaattacaacaagagtttacacatcatgtttttaagttacaacaagatgaatatgttaaggaagggattgaatggtcattcatcacatattctgacaatcaaccatgtataaatcttatagaatcaggtgaaggtatattatcattgttagatgaacaatgtaaattaccatcaggatctgatgaagcttgggctgagaaaatgtttcattctttgacaaaaccaccacacaataaagtgttcaagaaagctagatttggaaatgaaaaatttattgtttctcattatgcattagatgttaattatgaagttgaaggtttcctagaaaagaatagagatagtgtttcagatgttcaaaatttgatccttaaatctacaaagaatgatttttttaaaaaaattcaagaagaatcagaaataaagagcccacctcaagaaattaaaagaggtttccaaaatagaaatagaaaaccaactcttggacatattttcaaacaatctttgaataatttaatgaaaacaataaatagtacagatgctcattatatcagatgtatcaaaccgaacgaggaaaagaaaccttggcaatttgataatacaatggttttatctcaattacgtgcatgtggtgttttagaaaccattagaatatcattagtaggtttcccatctaaatatacatacgaagattttttgcagagatttcatgttttgttgaattccgaagatttgaatgaatatcaaaaaacagagccaaataatcacgaagaacttaaaaaattaagcagcaagttactggttaatctaattgatgataaatcatcttttcaaatgggtatatccaaaatattttttaaaagcggagtattgggtaaattagaaattgaaaaatctagtaagattcacgatgctgttgttacaattcaaaagaattttagaacatacattgctagaaagagatatcttgaagcaaaagaatcagccattcaactccaatcagtgttacgtggtttgattgtccgtcaaaatatgaaaaatatgtttgaaagtgcaatagttatacaatcattaataagaggtgtaactgctagaaagttgtttaccaatattaggaaatcaattattgatattcaaagctatggccgtggatgtattggcaggaatgaattcaatgagttaaaattggagttagaagcagagagattagaacaagagagattagaacaagagagattagaacaagagagattagaacaagagagattagaacaagaaagattagaacaagaaaggttagctgccgaaaaattagaggtagaaagagtaaactcagagagactaactgcagaaaaagcagaagctgaatcccaaagattgattcttaaaggaaaagaatcattagaaagtattcatgtaccccctgttcaggattctcaagaactttataaacaaccagtatttactgaactataccccgaggatgatgatactgatgaggtacataaacacgtgttggagaatttgacaccacataaatacacttatgaagaccttttaggaatgaagcctaaaaaagcagttgcttttatttccagattaattgtaaaaagaatccattcaatcaccaatagtgttgaatcatatcaaataaagaataaaggtcattatttttcagatatggagttaactatgaaaattcaatcgaatataaactctgatataactaccctaatcaaacttttgaaacgtcaaagatatattagacccgaaatcgttgataggaactcactgcaaagaacggttactaatagatcggaatacatacactacaaagtactcattgacgaaaagaccacacatttagaaagaagttataaagccgcatatggtgacatgttaagctatatgaatgttcccctcaattgcagttagttgtgtttctggtttattattaagcaacctaaacctcccagagagagctcctgatgctccgcctcatcttggtgatgttttatttccagccagacttgttgtatcaatcttgagtgatttatgggcagttaaaccttttgatcaatctgttatgtttttggtgaagacaactggcattattaatgaaaagcttaattcaattgatgatcctagggaattgataaccactggtgcgttcctcttgaacaatgctaatgaaatcaggagttatgttacctggttcagacacagtactatgattaacctaaatgttgaaaaaaggaaaagtaaagatagagatgatcatttaagaatgttgtcgataattaacagatattgtaacattctttgtggtaaaatgtatcaactatggatcgagtcaatctttaaacaacttgaaatcaaaataactggtagcgtgagagaagataaaccattttcaaatgataaattaacaaatgataatacaagtttgattcagattttagataatgtgtatttatctatggaagaaaattgttttgagaaggatgtccagacaaccattattcatgcattattgcattatattgatgttacatattttaatgttattattacacacggaaactatttaaatttcgatgaagggaaattgataaaattaaaattatcaccggttataaaatggtgtaattcactagatatccctgatggacctgaaatgttgttaaacattttaactctttcacaacttctgatgttgaaacagttggggttaattaatgttgatgatattatgaataaaggcactcacttaaatagagaacaagttaaaagaattcttaatgatgctgattcatctgaaaaagcagtgaaagaatgtaatgattatacccttccttacaaaaaaactatctttgatgacgcatttgtcaatagtaatcaagttatcgatgattgatgtagttttgatagaaaaatatttttaagctatagaaaaaatatataaatgttttgcgttgtaaatattaatttagaaaagatactttatagtaaatgtttgcgttggttagaaaagccaatatttggcaactactgaagttatgataactattgtagagactgataccatttgtctcatacttttgcttcttgattcgtttgtttttttcaatttttcaattgtgtctaatttaagttcaaattctttcaatacatcatcatttgaatgcattactgattttactgtattaattctagcagttaaatcattgaaaattttcaaataatacatcttttctcaaatttttgaaatctgtatcttttttcaaacctaaagaattaatatgatcatctaattcttcaatttgtgttatcatcattttttcaattttttcgatttctttatattgtttttcaacatttgaaagtattaatgagctttcattttcgatatattctattcttttttttattcctaattgaactgatctttgcaaattttgaaattcagtcaatgattttatatgagattagatgtgatttacaaacatatgaatcatctggttgtgatttatttgctaaatctttaactgcgctatttgaattgtctccagtactattgctataacgatgcatatgattatgtttatattgattctgtgaagctctacatgcagcttgcaataacccagccgatcttttatttttagaattcaaagagagtgttgatgttgagtatgcgtttggatcattatttgcaaaagctgaatttgtttgtgcagcagtaggaacagtggagttatttatcgagttgtatgagttttgtgaagtactttgagtggatattgttttaactaacggtgccaaaactgtcggtggtgcaagaactgtaggctgattgatgtgattaaattgaggtaattgattagacggaatgtttttgcttaaattatattcgtcattagaattgcttgaagatagtggataacttactgaatttgatgcactatgcattcgtctaattgaagaagcggttgacgtagaggaagttgatgagtgtggcgggcgagctgatactggtggttgtaaaagtgttgaattagcattatttgattgatttaaattgctttttgctagtaaaaaagtatgatcgttatttgttgctaaatatctaccatttgttttatttggtgatgaatgtaaagaatttttggtgggtactaaatgattataagcattggtattagattgtggatttggtaagtttatggaagatgtggaacgagaacttgatgtgaaagttggtaatttcagactagcagttgaagagtttgaagagtttgaatcagattgtttatgtgaataactattagtagaatcattattagttttagatattcttggcagtgtatatgaagaattcatgttatcattgaatttatatgggtaagtttgtaatgtagtttgaattatcatttgtatcatttatatcttgtacagtttcaaattgcccattattgttatcaggatttaaattatcgtgtacattagtatcatttggaacaatcggaacaagtggatcaagtggatcatcattatcattatcatcattatcattgattacttgatcaagttgattcatttcatttattccaacatttctatcggaattataatctaatgaatcatcggaagtgaaaggaaatgcaattttagaaagtctctttttaattcttgatttctttgaaagattagagtttgtaactggattaattggagaaaaatgtatatttaattcattattaataccattatctggatcatattgatcatgaacattattttccaccactgtacctgccttacgggtcaacattgctctggaaatgttgttaaaaggcaagattaaattgttactgtttcaattctataatgttcaatcagcagcttcttcatcggaaaagttaaattcatgccggcagattacgtaagaaacggtttaagccaccattttccaaaaaagccaaaagacgcgactatccacaagaaaattgaaaaaaataataaaatacgaaacgcgaaaacttactctactaaataaataaaataaataaataaaataaatttgagaaaagaaaaatggtgaaacttgccataattgttttgattttgattttggtgatttttctcactttgagggggggcaacttcattgactcgattttttactagtgtttttcagatcggtttcattgctggctcagatcttctgattttttaagctttcatttacatttgtatttagatctatttcatcaaataaagttatcttcttcaaatatgtccactgtacaacttgatgaaggaaggtatgtatacattttcatcaattaattattatcatataaacaaaaatactaacacgtttcatattatagcttatgttggattcctgatcctgaattgggttggcttgccgtaaaggttaactcaatcaaagaaactgatgggaaatattccattgaattatcccctgataatgatcctgaaaagattattacaattacaactgataacttagatgaatcaaattctgatttacctttaatgagaaatcatgcagaaaatgtcgaagatttaacaactctgtctcatcttaatgaaccttctgttttgaatgtaattaaattaagatattctcaatttaatatctatacttattcaggtattgttcttattgctgttaatccattccaaagaaatgatgaattatattcaaattttagaattaaaagatatgctaatacaagaagaggtgaagaagaacctcatttatttgcaattgcagaagaagcttatagatgtatgattaatagaaaggaaaatcaatctattgttgtttctggtgaatctggtgctggtaaaactgtttcagctaaatatattatgagatattttgcaactgttgattctgatgaaaatcatcatgatatgtctcaaactgaaaagcaaattttagctactaatccaattatggaatcttttggtaatgctaaaacaactagaaatgataattcttcaagatttggtaaatatcttgaaattttatttgatgacaaaacaactatttgtggtgctaaaattagaacttatttattagaacgttcaagattggtatttcaacctaaaactgaaagaaattatcatattttctatcaaatgattcaaggtttagatgatgatactaaaaaatcattctatttaactaatgtagaagatttccactatttaaatcaaggtggcgcaccaataattgatggagttgatgataaaaaagaatttgaagatacacgtaatgctttatcattaattggtattactgatgaaaaacaactagaaatttttaaaattcttgcaggtttacttcatttaggtaatattgacattccaaaaactagaaataatgcaaatttatcatcagatgaaccaaatttagttaaagcttgtgaacttttaggtttagatccagttaattttgctaaatggactgttaagaagcaaattaaaacacggtttgaaactattaataccgatttaaaatataatgaagcaattaatgcaaaggatgcagttgctaaatttatttaccataacttatttgattggttagttgaatatgttaattcagatttatgtccttctgatattgaaagtaaaatatcgacatttattggtgtgttaggatatttatggttttgaacattttgaaaaaaattcatttgaacaattctgtattaattatgcaaatgaaaaattacaacaagaatttactcagcacgttttcaaattagaacaagaactgtatgttgaagaagaaattgaatggtcatttatagagtttgctgataatcaaccatgtattgatgttattgaaaaaagactgggtatcttagatttattaaatgaagaatcaagattaccttctggttctgatcaacaatgggctgataaattatatgataatttggctaaacctccatccaataaagttttcaaaaagccaagatttggcaataataaattcattatttctcattatgcattggatgttccttatgatactgaaggatttgtggaaaagaatagagataccgtttctgatggacaaaaggaaactttaaagcaatctactaatgaattcttaattgaaatcttaaatgttaatgaaaaacaagcaagtgaggaagaagcaagtaaaacagtaaaaccaggaaggaaagtaccaggaaaagaaactttgggatctaaattcaagggttcattgattgaattgatgaaaactattaattcaagtaatgttcattatattagatgtattaaacctaatgaagaaaagaaagcttgggaatttgatccaaatatggttttatctcaattaagagcttgtggtgttttagaaactattaaaatttcatgtgctggtttcccatctaaaatgacataccctgaatttgccgaatcttttaatgtattgtttgattcaaatgatcgatctaacttattaagaagtagaaatttggatgttgaaaatctaaaggtattgacaaagaaatttttggatgatacaattaaagatgatcatagttaccaaattggtaaaaatagagttttctttaaagctggtattcttggtaatattgaaaaaatgaagagtgataaacataaagaatctgccattgtcattcaaaagtatttaagaggatatcctgcaagaaagatgttcaaagaaacaaaagaatctgttattaaattacaatcaagtattagaggttatttagtaagattgagaattcaacaagaaaaagaaagagaaagtgcaattcaacttcaatctttgtttagaggatttttagtaagaaataagtgtgaacaatcaatcaaatgtattattcaattacaatcacttgctagaggtttaactttaagaaataatattttcaaagatacaatgaataaaaattctataataattcaatctggtgttagaagatatattgccagaaaagaactcaatagagtcagaaaaagtgctattgttattcaatgtggtattcgtaagaaacttgctaaagaatattttgataaactaaaggttgaagcaaaatctttaaataagatgcaagaagttcaatatggtttggaaaataaagttattgaattaactcaatcattaggtcgtaagatcgaagataataataagttagttgaagaaattgaacaattacaaaaattagttgaaaagactcaaaaagaacatgaaattatacaatctaaatctattgaaaatgatgaatcccatcttactcaagttggtgaatatgaaaacagtatcaatgaattaaataaagaaattgaacttattagaagtgaatatgagcaagctaaagacaaaattgaaactttaactgccagccaagaaaaattgaaggaagatttaaagatcaatttagaagaattaaagaaagctcaagaagatttaatttctagtaatgacgagaaagaattattagttcatactgttgataaattgaaattagaattaaaggatcttcaagaacatatgagtaaggctaaattcaatagcagtgcaatgattggagcaggtgtaggagccgcagcaagctggtagttgcatcagcagctggtagtgcaggaaatgcaattaatggacctgcactatcattcaatgaaaaaagtgtcaatagtgatagccttaatagtaatggtaattatgatgaagataattatgaggataatgatgatacaaaggaactggaaaatattaatgatgaattattgaaattattgagtaattccgatttaattcatagagaaatcatcgatggtttatttaaagggttgatattaccatcaatttcaaataatcctactgaaaaggaagttttattcccatcaagaattattattattatattaagtgatatgtggagattaggattaactaatcaaagtgagaatttctttggagaaattttagcaacaattcaaaagcttgttagtgaattagttgatagtgatatcataacatatggtacattctggatgattaatacacatgaattatattcatttgtttcatatgcacaaaatacagtttctagtaataaagaagttgctaaagtaatgggacaagaagaatatgaaattttcttgaaattaattgctgatgcaaaggaagattttgaaagtttatcatataatatttataatatttggatgaaaaagatattaggtatattagaaactaagagtgttcaagcagttgttttaagtcaatcattaccaggatttgtatcacaagaacaatcaccattaatgagtaagttattcagtaaagaaccaaaatataagatggatgacatattaacattatttaatgaaatctattggtcaatgaagaattgcttttttgatgaaactattataaatactgttattagagaattattgaaatttattgatgcattctgttttaatgatttaatcatgagaagacaatttttaacttggaagagaggtttacaattaaactataatgttatgagattagaggaatggtgtaaaacacatggaattgaggatggtaatgttcaattaacacatttatttcaagttagtaaattgttacaattacgtaaaaattctagtgaagatgttgaaataatttatgaaatttgtaattcattaagaccaattcaaattcaaaaattattttcactgtatcatattgcagattatgaggtaccaatatcatcaaagataatagatgaattaacacatagggttaaaacaagtggagatactgaatatttagaaactgttaataaggatacattatttgatgatccatttagaatgattgatttaagaccatttaataaaattgaagcatatgttccagctagattaacattgccaaatattcgtcgtattattgaattaagtacattaaatgcaacatatcaacaacaaatggaataaatcaaattaaattagtacatattttattctttgtatttgtaaataattaaattatataagataataaaacaaacaagcatataaactataattaaactataacgatattaatgatattaatgatattaataattgatgataataatgaactataaacataaaatctactttattttcattaattactgaaatgaacagcaattggtacaacaaccactattataataattataataataagggcaacacataattttaattttaaattctttttccacatatcttttctaacttgatttgcagatttattaaataaggaagcattattttgtaatgaataagctctattatctatatcatctaaaacttcaccacgttgattaattgcttcaatattatctctcatcataccagcagtatcatctaaagttgattgtaaattttgtaattttgatgaaggatttgcatttgttgtattattattttgattatgattaaaaggagatgatgaatgattagctaattcagcagcagcatcatcatcaaaaggattatatggatcataagcttgagctgaggacattgttatataatgaagtgtgtgtatgtattagataaggtatgttatacaagatttaactatttatatcaaacatcatcatggagttgtaagggagcttagtattaaattgatggtttcaggcgtggaaaatcaaaaattttaagtttttgttactattattattattgttattgttttctcttttaaggactaggctttgacttagtacagtaagaatatatattatagatatatagattatagaatattagatgacgagtgttattaagttacggagtggatggcatgttgatcaagccattgtacgagaggaggagagaatagtttgtataagatttggagtggatggagagagagagaccttattaatagattcaatattagagaagataagtataagtgtaagtcaatggtgtgcaatatacagtgtagatattagtaaagttgttgatttcaatgatatgtatgaattagaggtagatgaatgtgtacttatgatattctatcggaaccgtcacgtgatggtggacattggcagtggggacaacaacaaaatcggtgtcgtgaaaatagaacggtcacgtgacgcgttgattgatttattagagaaagtttatagaggcgcaaggaagggtcaaggtcttgttacagtttaggtgatggatgtctttgatgttgattcattttaaacaatggcgtctaatgaattaccatcctcatttgaggatccactagaggatttatcagttttagagaaattagtttatagaagtaaacaacaaccattagttccattaggttgtttagcaacaacaattgcagttgcaatggcagctaaaggtgttagaactggtaatacaaaatctgctcaaacttggtttcgttggagagttggattacaaggtttcacacttttagcattagttttcggttcaatttattatgataaaacttttactcaacaaaagaaaactgatgaagaattagcacttgaaaaggcaaaattaagggaaaaattatggattgaagaattagagagaagagataatgaaatgaaggatagacaaagaagagctcaattagcaagagaaaatatgaataatattaataattctaataataatgataaataatgatttatgaacaagaatatataaactatataatataagtaacccaatgattcaaactatatactattactcttttgattctttcttttgtttacgtataaatctaacatcatcaggactaaaaccaccttctttactaccaaaatatgcccattttggagttttagcaatataatccatttcattaaattctttaccagattttaataattggaaaaacttttcataatcaatatgagtataccattcaccattaattaagaatttttcatttgcaattaagaaacaacatgaatgtgaatgttctgcacttataccataatttaatccacgtctatttaattcttcatttaatttattaacaaatttaacacattcttcataaaatggtatattttgcattgttaatggattaccattaccatcactactaccacaaaatgttgcacctttaatttcaattaatgatggtaaacctctttcaactaaatctgcataaccttgaatttcattcatattaaaacctttaactaatgttaatctgaaaactgttctttgatttttttgaattgttcttaaaatatctaaacattcttccattctttcccaaaaatctctaaataatggtctatcaacaattttcaattcatttttactacctgcatcaatactaacatataattgtgtaacttttgataatgtacgtaattgatcaggatgttgtgcattacaaactaaaaatgatgaaatttcttcatcatgtaacatttccaaaaattcattaatatatggataaaaaattggttcaccaactaatgataatgcacaatgacgaactttaaatgcttcatcaaatcttttacttataacacctggaacacctctcatttgtttaattttagaataatgaccttctaatgcaccttttaaaattaattcaggtttatcaacttcccatctccatgttgtaccaacaggatttgtaccatgtctccaacagaaaacacatttattagaacatgataatgcaggagttgtttccatacatctatgagaattaataccataaaatgcatatttataacaaaatcctctacctcttaaagctgcctttgtccatctacaaattttaacacctgaatgagatccaacaactgtataaccttgctttgttaatgatttataagttggagaatcttttgcaaccatttgctttttctctaatccattatcatctggaagttcatcactcttatttaaatcttccatttcccatgtatcagtatctttatcactactattactttcattatcttccttgtcatcattatcatcttcttcttcaaataggaaaggttcattatcattgaaaacatcaatcattctattaatccaaccatcggcaacatttttaaaatcgtttttaacacaaattttacctaatgggaacattcttctaccacctaatttactaattaaattatcagcaattgaagcttgataacaaaattccttttcaccaccccaactctctgaatcacctaaaccaacaactgtaaatccagttaatgaatttaatgggaatttatcaattctaaaatcattatttgtttcatttaaaaattctaagaaataatcaattggactatcagtttcataagaaggtaaaactaaaatataacgaggattaccatttggaattttaataaaataatcatcaagatcatcaatatcatcatcaatacttaaaattttaatttctaattcattatttgaaattttaaattgattgaaaatttgttgagctatacgttttgaagtaccagttaatgatgaataaaaaatataaattggagtatttggagttgaaactgtataaatatcaccagtacgctttttacttaatttcttaacacttggagcaatgattttacgtactttacgttttctaactgtagtaaaatcattattattattattattattattattattattattaattgatttaaaaaatggagaataaattaaagatattaataatatggagaaaaataaagaaaatttcccataaattgatatcaggaacaatacagccaatgatactgttatggattcactattcattattgtatagtgatgaaagatgtgatgcaaagaacgtaaatttcgaaatataatatttccaaattaaatttccagattgaaaaattaaaaaaaaatttaaattttcatgtaaataaatctaagagaccagttaccttgattgagaaagaaataatccatgttacgtaatcaaatggaaattgattaatttaattctatgatgtcacacatgatagtaaaattaagctttggtgcacatgtacataacatgagaagattgaagattgggaattgattgtagattggggataatagtatataccctctttcttttgctttttgcctttaatcatcaattatatcacacagttatacccccatttaccccctaattacactaaacttattacatcatcttatattaaatctatttatctaaaatatctaaattatacccagttttatattattattatttgtttatttatttattcattcatttcatttcattaattatacctttccatttccatttccattttgttcccgttcccattctcattcccttcctcttttaaattaaaatattgaaatgcctttatttaggagagattcatcaaaacgttcaaattcttcacctgttagatctccaaatttaaatccttcatcaaataattcttcaattttaccaacggaatcatcaaattcaattacaagttcaattgataataatgatgaaaaatctgaatttagaagaaatcatcgaagtagttcagtttctcaaaaattgaaaaatttatttattggtgatcataatgatcatattgaacctactaataataataccgataataataataccactaataataatattgatgatacggctgaaaattcacttaaaggatcgttatcaaataaaaaatcaacattaccaatacctaatagaacaattggtcgtaataatgttacatcacattcaatgcaattgaaaaataaagaaatgtttgatcaacataataataataataataataataataataataataataataataataataataataataataataataataataataataataataataataataataataataataataataataatattcatattgaacaaccaaaatcttctcgtataagatcatcaactgtttcagctcatggtaattatatgcatgatcaattacctgttttacatcatactgaaaccgttaattatagttcaactcatttgaaaaatgaaagagatttaacaattaaattaaatacaagattaagcttatttgataatggtaaattacatgaacatgatttttcaaaatataaaactcatccttgtaaaccaactgtcggattatttaattggatgaaaaagaaagaaagtatcaaaggtgatttagattctcaatcaaattaccaattaattgaaaaatcaattagtttattacctgataaatattcaggtaatttaatgagaattaaaaataatccaaaaaattatatttggaattatgatgatgatgatgatgaagaagaggaagatgattttgatgatactgaatatgatactgaaaatgatacgaatgatgatgatgatattgaggataaatcaagacctaatctgaccaggaaaatgagtatggcaagtgtttatagttcaagaagtactaaaagtagacaatctaatagaattacaaaacattataatagtgatgatgaatatgagaatgaaaatgattatgtaaaagatatggcaggtgttgattcttctgatgatgaaaaggaagaaaatttaagacctgatataacaaagaaaagacatgttagtacatcatctgaggaagttacaagtgaagaagaagaagatgatgatgaagatgacgatgacgacgacgatgatgatgattttgatgatgagattgataatataatgattgaaccaattattggtaaagaacaagttttcctcatcaatagtatgttaaacaaaattgaaaatcctgaaaagtttaaaaataaattaaaggagaaaaagcaagaaggtaaaattaaacttacattagctcaaaaatatggtcatattgaaggtgttattggtaaaggttcatatggtactgtttgtatttcttctaaaactgttaataatactaaaattttctttgcaattaaacaacttaaaagaaaacaaggtgaaactttacatcattttggtaatagagttacaagtgaatttatgatttcttcaagtttaacacatcaagcagttattaatgtttatgatttaatgtttgatccagtttcaatgacttatagtgaaattatggaatttataccatgtggtgatttattttcattaatttcaataactcatggtttagatattgttgaatgtgattgtttctttaaacaaattttaaatgcaattacttatttacattcagttggagtttctcataatgatttaaaaattgaaaatttattattaacaaggaaaggtcaattgaaaattattgattttggtacatcagcagttttcaaaactgcttgggaaaatgatattcaattatcattaggtgcatgtggtagtgaaagatatgttgcacctgaacaatatattaaaaatcgtgaatatgatccaagattaggtgatgtttggtcattaggtataatttatttaacaatgtattatggtaaatattcatgggaatctgctaaatcaaatgatgaacattatgtaaaatttgttgattcaagggcaaattatgattattcaatgaaaagtactttaagacctcatcaatttaaattaagtaaaattggtacttattcagcaattgaaaatattaaaggtggtattgaacaaagttggagatcaaaatgtggtaataataatattagtggtgatacaaataatattgaattaattaatgattcaagaaaatatgttttatataatatattaaatcctgatccaaattttagaatgagaacttatcaaatttggcaaagtgaatggattaaaagttttacagtttgtgatgcaggtagaggttatgttagttatgataattatattgaaatggcaatgaagagtgcacaagatgttgaagaaaaagaaaaggagagagatagagaaagagaaagaggagatagagataataaagatatttctaaagataatgaaataattaaccaaaaatctaatgaagatatgaaagataaattggaaagaaaagaatctaaaaaaagttatggattcttaaatttaggtaaaatcaacaagaattaatgattttttttataatgattaattttaatactataaagaatgtgtattataatttttgtgtaattaataattaataataatgacaatttaagataataatttttattaacgaactacattaaaagagagattaacaaactaaataatttcttccttttttttataaaatatttaaattttagaaaaatattgataaactaaatttagttaacaaagtagtgtgggaattccttgaagttgttttctaaagaacctttcatggaaacgaatttaacataagcaccatcttccttaacttcattgttttgtctctttgcaatatattcatctctgtttaagttggtaaaaccccatttctttgagataataattctttgttgacctgggaatttatatctagatcttcttaaaccttcaataacgacagctttgttagaatctttagttctaattgaaattaaaacttgaccgatagtaactctagcagcacaaccatgtggtttaccccaagcacctctcataccttgttgtaatctatccgcaccagcacaagacaacatcttgttaattcttaaaatgtggaatggatgaactctaactctcatatggaaagattctctaccagattgaacggtaatatatttgtttgcacaaatacgtgcagcttctaaagcttctgatgataattgttcaatttcgttagaaactaaatgaacacataatgggaaatcatcaacggatgccttctttctacctaaatcaaaaattctaattttagaatctgggacacctctgttatatctggattttgggtaaggcttgttcttacagtatctgtaacatcttgctggtcttctagccattttgattgattatctataacaaaatattataataagatatgttagtatttgttaaaacaattttgaaagggaaaagaaagatgtaatagaaaggtagaattaattttatagtgaaagtttcaaaatgtgaaaaaaaatctgattactaatgtataggaaaatttgattttcttctctaaaaatgtggtgtttcgagtcatgtatttgatattgaatgatgtccaacactgtggtgttttaatctaatgatgtatcctgttcatatgtttatctgatcttcatgttttaattaactttgtctaatatttagcatttaacatttcatataagtaatcttaaaatatatcctacttttcaataccactgacactggtttaatcttactagttcttagtcttccatctatgacatgtatatgaattaaagggtacgtacctgtttggttattagatggattccaaggacaaaatactaaaaatctaataaaattcatatagtaacaattaaaattctacaaaactaaagtaaaaattcaaataacagtaaagtgtacaatcaatcaatgcaactgaaaaaaattatgaattttaactaacttttccccagtggaagtattttttgcccaccagttttttcaatccccgctcattttggggaaatttagctactactacttacttactaatcaattattcgcacagtactaaatttttgtgcacgcgcctattcaacagtcactttttaaagtatgtatttttcttttttggttttgtgtctggtgcgagtgtgcatgctgagggtttggtttaaagtatgcccttttgccaatcacgtgtgtggcgcatgagatttatttataaagatagtaattgcggctagtgttggaacataatctaatctttaatgaaaaaaaaaatattctgaaaaaattttaaatcattaaattaatcattggtaaatttgatttatatattataaattagcatcagttcttaaccaatttaaaaaggaattgaatcataatgggtaggtattccgttaaaagatataagaccaagagaagaacaaaagatttagatttgattttcaatgaattatcaaatcctgaaactattcaaaaattaaagcaacaaccagaagatgaaaatcttccaggtttaggtcaatattattgtattcattgttcaaaatatttctttgactaatacttcattaaagggtcatttacgtggtaaagttcataaacgtcgagttaaagaattaagtgtaaatccttatacaaatttagagagtgaagctgcaactggtacaaatttagaaaaattctttcaaaaagttcaacaatataaagataatgaactatcaagaaaaaatatggaaactgaaatgcttaaagatcaaactaatgaatatgatgtacgtgatgaacaaaaatgggcagaaatgtatcctgaaaaggcacaagagaaagctttaaaggaaatacaggaagctgaattaattcaaaagagagctattaaaaaggctaaaaaattcgaattagaacctttaactgatgatgaaattgaaattgataattaattaatagattgattgattcaatgatactatcatttcttcccctatatcttgtacaataccacttattctatatttaaagtatcacttattatatcatttttttttcgtatttcttttctattagtctcttaaatatatttacttactactttataaatctaaattataaagatctattatatcattaatcattagctatatttattatctcaaatctttgattttaaatggtaatcctgaccttataactacatgacccgatgaaatctgttttgtgctaattctattacaatcaacatataaatcaggttcttcatgtggatgaaatcccggttgattacaattagttatcgttggtacacctggtggatcagttaatctgaaaacacctgtcttcttgggaaatttatcagatggtgcacaaacaatcgcaattgcttcatttaacattatttgatatgaattttgggtatgtaaatcaactgatgataggaaacatgattgagttggatgtgtatgaatccaacctaatataaataaatcaggatcttcattatcaataaattcaaacattttctcttcattttttgtagaacatgtatcctttgttgaatcttgttccggtattagtagatgtgttatgaaaaatgcatttctgttcaatttaccaactaatattccacatgtctctaaatctcgtttagtattaggttctgcgatttgcaggaaactatctgataattcagctggtaaaaatatagttctcagaggagccccaccttctgtaaaattaacagttttatggtttgagtcaattttgataggtgatgttaatgaatttatattcttagttagattactaattggcttgggtttactgaatgatgatctttcagctttgatttgtgaattggtgttttgtgatgttcttgataacacactatcatgataatgaaatacactattatcatatgcatcatccataattgcattatcgtgtatagttgggtataattgtgatgataaatcaattgaaggtttgacagaattgaaagatccatgtgataaagatcttagtttatccaataaatctttatcatcagaattcattgatgatttacgtctttctatgtttttcctataatcaatcaattcacgttcctctatctctttcctttccaaaaatttctttctttgtaattctctaatttcttgtcttgcagtttctaatcttttatattcatcatattctcgtttcaattcctcaattatactctcagatcgttccattgcaatggacaaacttggaaccaattgttgaaattcaaaatataattgacctttcttattagccttatccttcttatatatcgctttactttcctttaattctgcattaggtgctattcgattagcaactaaatcaacaaatcttgaatataatatgaatgcatcctctcttgcaccttctgaatcataagctttagcatttcttaatatcccagatgctgatcttattaatagcttcaatggatatttactctcgtacattttagttctttgtaataataattttggatcacttggaatcacatttggtaaactgaatgatgtacttgaagtacttgaacttggtgacatcggaacaccattttctcccatttttgtttatttacacttttattgttttataacttgtagatttgtacaatctagcatgtatacaaattattgaagaggaaaaagaagataatgcatgctacacaaacccatcccgccttgggtacatttaaagattacattcaaattaaatattgcgtaatcattcagatgatctattttctacaatacgaagcacagttagtgatattttgtacgtgaatggttactcttttttactaactttatctagttttatacagtatgtttccacctgattaaatctccaccactcataaaagcccataaacaattatcatttaagtaagttccgtaaatacgtcctaaattaacatttttctcacttactggtagaatactttcttatagttgttgaaccagaagatgaatgaatgaatggtccatcggaaacactttcatgaagtaaaacttttttaggtgaaatgttaattttagcaaaaaataatttttggaaattaatgcagctttcttaacatctttgtcataagtaatagaggtggacaatgaaggttgaaaaccatcatttaatttcaattgttgtatatttgaaacttgactttgcggttctttgacttgtggagatggtatatcttgaattatcatacccattaacgatcgtttactattagttaaattcattgaatttagggtatttgatgatttattaaaataatcttttcttttagaatctaaacttggatcaattgaagttgatgataatgctctattcatttgatatcttggtgagcctaagtatgatgtaggattactatgcattttcttccccttccttaaacttcttggttgaaactcatagaatctgacatatccatcatcccctgacgtacatattgtataattcaaagaagcattagaaccttgtttacaaatttgaatatctcttacccatgatttagcaccttgtaatcttgatactaatttaatcaaaccttgatcattcttaactgatgatgaaaatctatttgatgaaaagaattcaaatgctgaaactaaatcatcttctcctccaacaagtaagaatctaccatctggggtaaattctgatactaatgcaccaccataaaaaataggtgttatatctgttagagattcggtgagtagatcgagtattcgcacaaacccatcgtcggatgttaataccactatattatcatataatggatgaactttgaatggaggttatagcagattttgtaaatttataatgagctaataaacttgatgaattgctttttgtcttaagagatttataaactttcatatatttttgattatgaacaagtttaggttgatattcaaagtctgaatcttctaaatttctatcaaatatgattaattcaccatcctcaaatccggaaaatgcataattcccacattttgaccattgaattgatgtcaaaattgcagattttagtttcccatttttattccatctagtatatttcattttgaatggattgaaccataatatatcaccagttgcaaatccaaataagatatccagatccttttcacctttactgttttcactttgaaaagttgcaatacatgtgataacactatttgaaattacaattctaacacatggaggctcaacatcgacatctttgggagtatcatttatgttaataatattgattattctaccatgagcagagactagtaattctttagaattattcagtttcctaacataaccatcacatgtattatatctttcaacaaatgttgatgaatttctagtcagattatttttaggtaatcttaaattgcttgatgggtttgaaattacagtggttttattattattctttgattttccaaatattttattaccaaatgtattgttgttatcattaggggaatcatttttataagatttaaatctcactatcgttgaaacacaaccgggtattaagtgaacaggattgaaacaatcagcaactaagggattcaacattgatcctattaaacttatttctgttttaccatctgaatgtgatgcaattaattctttaggtacacttaatggaggtttatctaattgattaaaacctaaggcaccactacttgaatgaaatttccggaggttatactcagtaaactttgaaagggcagcataagttgaaggatcatttggagagagaggagttctagctattctgagagcataatcaggctcatataattgatccaaatgagtaaatttaaactcttcactgttaacattatagataatatttggatctgtagtctgagtcggatatatgtttgtagctaataattgagcaaaaatcacaggtttttgggtatatcttgaaatatctaatggaacatacatgataaaccaattccgcttcacaaatagtccacgctacactgcaattgctccaaatagagagatgttgtgatgaaaagtctccttattgagacatttttacactgactctgtcggatttaatttcattgtggctttcttcccgccaacagaaaaatcaaaactttctttttacgtaatattcttatctgttatgggtagtagtatctatgacacggttttttgttgtgttagtagctgttttgctgttgtatgcgtgttttatatggggactaagtggaagttcattgtaaaaattgtagagatatttatcataaatgaaaatatgtaccagtaatagttatatttcataaaataaagtaatttaacgtattaaagatttgaagcccccaaaaagattatgaaaaattaaaattagtttgtaataaagaaataagccatcaatttagttagtaaaaataccacattttcaagagttaatatcaagataatgaattactaaactactattttgttctttgtatttcaattaataggtcaaaagtggttttatggaggcatcaacgcattatatcaaaactattacgtaatctttttttactttaacatgatttctaaagattttgattgatttttacaaatatttttttcctagaatttaccatcttgatcaactttcttctttttgactggagaagacagtatatatcaagtatgactaacaaagatatacagttatatgagccgggtgaaacaaaaaagttatctgaaacagcacttcgaacaagagatgctttaaataaaataatcaatgcaaaaaatcacagtaacaaggttacaactctttcaaattcatcaacctaataatgatagttcatttgtgaaatatacatcagcacaaattgcagatttatcaaacaaagatggtgaaattaaacacagacaaagagtgattaaaataaaagacgaaaaagttgatcctatgttaccttcatcatttcgtataagaaaaactccagcaggaccacaaacagattctatagttccagtcttacatgatgaggttaattctgaaaaacttactaaagctgatcaaaagaaatggcaaattgcaccatcaatatctaattggaagaatactaacgggtttataattggtattgataatagaattaaaaattcacaaaatccaaataaattatcagaggaagaaatagtccgaagtacggaaaaattttctgcattgagtaatgcattaaaggatgctgaaaagaaggcaaaggaagatctgaaagctaaggcaagttggcgtaaaagaaaggaggatgcacaaaataatgaaacacatgatcgtgttagtagacttgctgaagcttcaagaaatgaaagagaaaataaaaataacaataatgaaaagacaagagatgagatctatgcatcgatgactaaagaggaaagacgtgctgaacgtaaacgtagagcacaagaagaagcagctaatgaaaaaataagtactaaggataagatacgtaaattggctagagaacaaggccgtgatgttagtgaaagggttgttttaagtgtatctgaagcattgaagaaaaaacaaaaggaaagtatttatgattccaatttatattttaaaccaacagatgccaaagatgaaacaggtgatttggtttatgataagccattgttttcacaaactgctgctttgaacaatatctatagatctagaaatttggaaggatttaaaggtttgggtagtagtaaagatgatgaaagtgaatcaactgctgttaaatttaccaaagacgacgaaacttcaattatttctgattcaaatcatcaaacatccacctgaatttaaatgaaacatttgaatctttattttagtttgtcttaattgtattgtattcagctttgtatattagaaatttaataaatttaacttgtaactttaaaggaaaataatctgcaacatgaaaatttgtaaacgacatgaaaatttcacctttaataaaaactatattttctctctaaagaactatacgaatggaacactacaaaacagttatcattggtgccggtatatcagggctagctgctgctgaatcactacatgagaaaaatgttgattatgcaatttttgaagcaagagacagagtcggtggaagaattcaaactgatagaacaggtttagcaccttatgatttaggtgcatcatgggcacatgatacacttacaaacccactatttgacactattttggataagattgatgtcgatgagaaagatgaatataatctctattatgatgatcaacgtcccctatatttcagtgatattaaaggacctaaattttttgaaaataacaagattgaacaagtaatgcatgaattggaaaaatttgttgaattgaagtactttgaagaaatagataaagacgatgttccactaaaggacataatttacgagtatatcaataaacagaaaagattattaacaaaagaacaaatattatatgcaccacagttggcacgtcatttagaactttggcatggaattggatgggatgaaatgagctcaaaatttggtcttgttgataatgttggtagaaattgtttatttagaaatggttatgatacagtaattaataacattgtctccaaattagattcaaatcgtatatttcttaatagcatagtgaaaaagattgatagaacaaaattaccaatcaaagtggaatttactaatgggaaagttgtaacatgtgattggattatctgtactgttccacaaagtattctacagttaaaggtaccagaaattggatctattgaatggaatcctgctttacctactaggattcaagatgcattatccaatatgagttggggtaagttggggaagataatttttgaatttgaagaaccttggtggaaacattttgatactgataggtttgttgctcttgctaaacctgatgatgcagataaagttaatgatgggctacctaaaccatgggatttcccagtattggttttaaacttatacaaaattttcaatgttccagcattattatgttttacacaaggtaagctcacagaatatttagagagaaatccagataaagcatggtcatacatgtcaccaatactttccagattgataaataaagatttagacgaaccaaatgatatcgaacaagttaacccacctactaatactatagtttcacaatggactgttgatccattttcaagaggatcatatgctgcatgtaatccaaataatgatcctactgatcttgtcattcaattagagaagggtatacaaaatgttaggtttgcaggtgaacatactatattagacggagcaggagctgtccatggagcttggatgagtggtagacgtgaagctgatcatatacttattaaggagaatattatagaaggtacaattgatgaatggtaggaattaattatgaatatattattatttatttagaaatttatagaaatttaaaagctatgttttgacaagaagttatagagttttgttttgatttaaatgctgtgtagtgcccatgtattcggacatatttatatcactcacggagacggattctgtagtcggaattaaagaatctggtgaatttctagttagatcaggcagattgttattaaagaataaattattagcatcattgaatgaagttgtattagttgaatcaactgaatcagcgggtttgagattttgaggtttattaaccattcttgagctttgatgtaaaatttgccatttattcctatcagataaatttgaattcataattgtttcaagttctggattaagaactgaatttgaatttgaaattgagcctagagaatctaattgattaccagtaaaatcaggtgatataacagattgagttgaaattgaaggtgaagaagaaacagagctttgatttaatgggaattgtgaatttgttaattgaatattaacagctaaatttgtatctgttattacacttgagccatcacttatacgaattccatttataattccatgttctacacaattgaaacaacaacaatgatttggatcacaaaaacattcatcaatttcatcaaccggtgatgtcattaaatcattattattattattatcatttttggttgaacttaaatcttgatataatttattgaaaaatgtttgttcaaattggggtattgatgattgaatttcaactttaccatatggtttaattgtactattattaaattgtgataaaacatcatttaagttattgccattaccaattaaactatcaacttcaggtaaattattcaaagaatttgatatattactcacattattattcattattgaatttggttgtttttgaattgtatttgtattaaaataatcggatgagttatcattagatggaaatggaaattcatcaaattgttgttttatacttaagtttgaatttttatatttaatatgttctgtacaaccttcacaattacattgatcaggtggacaaagacaacttcctggaactgtacatgtatttgcaatatataaatcatataagaatccattatctgctagtgataatgcatttgaattatcattttgaactaaattaaaattagaattagaatcagaagtaggattgttatcttcattcaaactattaagtagtttattaacgtattctgtcttctgctgtaaagaaggtgaatcattggaattaatattaccatttactccatttgtatcattttcttgtttcttaacttgaaattgtattatatcaccaccacttttaggaattaatctttttgtactattattaagtttatccttatctaatgaaatatctaattgttgagctaataatttttgaccggaagaatttttatgttttgatcttgaaactctttcaattatatctaaaccaactttactatttggaatttcaacaactggatcaagtaatcttaaagaatttttatcaacattgaaaacttgtcttttggaagctttaagaatatatacaggacttgaatttttattacaagaaattccaacacaacatttacatgatgattttttaggttttgtgactttatcctttttatttgaacaacatgaagatacttgaggtttttgttgttttgaacagcaagaagatttctgtggtttcgatactaattcaggagatggtgatactgtactattttccttctttactttaacttcaacttcatccttcaattttttttcatctttattattttcaattttaacagttatattttcagtttcatttgcagttttaatttcattttttttctttgaaccacaacaggaagatgatggttgatgtgaaaatttaattgattttgcaactaaaagattattctttgaattatcattattctccaaagctttccttttctcatcttcatcatgaatttcctcagcatagatagcaattctttggaaagaatcagttaaaggtctacctcttgccctaactaaaactaacggtcgtcgtatatgtttacaaattgaagatctatgacctctaatacattgttcacaagcatatttttccccatcaactaatatcatttgttgggtattgtacaaaagcagtgatgactaatggatgataaacatgtaatctgatagtatgtatctttattcttacttgtatagagactctaaataatcaattcaaagtatataatggataagaaattttttatggcaataatttgctcatttttccattacagtgttaaagtcccattatatacaatttaatacattatatacagttaatgggggtgtggatgtacactatacttcactatactacactatcctatatacgctgttactaatctacatgtacaatgtataggataatgtacgattacagtaactatatcggagttaatacccaatgtattcggacattgcaatctcgctgttttatctcttttgggtaatctaatttaatttcatgatttattgataatttcattattatcaagggcaagaataacagaaaacaaaaaaggtaaggtattatctttctttattcggagttgggttgaattaacgagataatcacacatattatgtctgaaggtaagaaaagaagaagaccaccactttcatgtacttcatgtagagtaaagaaaattaaatgtgatagggaaaagccaatttgtggtaaatgtgcttcattaaatattgaatgtacttatgttacaccatcattttcatcaaataagaaaaaacaacaaaatatttcaaattatcagatttcaatttctcaagttgatacaagtaaatcatcatttcataaaataaaaccaattactatattacctgaaaatcaaattaaaattaatttccataataataatactactaataatactactactaataatgatattgttaaatcagatattggtataagtagtgctgaaagtactattagtagtgttgataatagtattttcagtaatattggtaatgaaattgatattgttgatattggtattaatgagaaaaaacgtaaaaggaaacaaatcgaattacaaattaatcaattgaaagctcaattagaactatataaagatgtatatgatcctgaaactgaatgtatttcaatggttttgggttataaaggtgaaaaagttgatagtttatggagtaagaaaaatttaagattttcagcattaggatcattcttagtttcaagtatttgggttagagataatataatgaaaagttttattagttcattctttgttgttagaaaaagtcaaaatattaaaactaataataaacgtgttttcaagaataaagtaatagataaatattatcctactaataaattaaattcaagtaatgacaatacttatgataatccaattgaatttaaatttttaagtgaacagttagatattaaaaagaatgaaactgaatatataactaaggacatttttttcaaaaaagttatccaaatgatgccaccgaaggaaattgttgattatcatgttaataattttttcaaaactatatacccattaataccaatacttgatgaaattatatttaaggaagaaattttcaaaataattcaattcccaaataatgaattagaatcaattaatattataattgatacaaaaattgattatattagaatttgtattcttttattaattcttagaatgtcatttagtcaaaaaattattgaaaagaatttttctaaaaagataccaaataatttaaatattttaaaatatccaattacaccttcaattataccattaataaatttttcattaactaaattaaattttttaagaaagacatcgtttgaagttttacaacttttattaatttatagattttatcaaattagaggatgtgaagatggtgatggatataatggatctgatggaccaatttatttaggtttaattaaatcaacatttagaacaattggaattaatttatcattttggaatgaaaaaattaataattttaaagaaattgaacaatttgttaaacaaaattttggtttaagtttattaaagagaggttataaaccatttattcatttatggaaaaaaatgagattaatttcattagaattagatttaactcatgcaacaatgtatggatgtaaaccacaatttgaatataaattaaatgaggaaagaatttttaaagtggaatatttattagaatttagtaataataatgatttaaatattgaaaaatttgcaaatgatagattaaatagtttccttaatgttagttatcaaataaatgatttattatgtaaacttcatgattatgataataaaccaacaattgaagaaattgataatcaagtcaaagaattaatttatattggagatattaattatgatttaacaaatatgaatgattataaaaatcaaaatattaatttattatctgaattgaatataattaaatctcaatcaaatatttattcacttgttattataattcaatatattttaatattacattcagaatatttatgtagtaaagatgatggagaattaattgaaaagagtagattaaaatttcaagaaaattttattaaattaattgataattatttacttattagtaataattttttaagagtttgggaaattaatgaagaaaattgtgaattattattcttaacatgtaatgatataaatgaattatttgataaattaatgatgattacatttttcatattaattagattattaagattccaacattcaattaaaaataatgtggataataatataacaaatatcttaaaggaatataagaaattatattataatgttttaacagttttcaggaaattgatttatgtcgaaaggaagttatcaagattttggtataaatcgttgaggtattatgcagctgtaattgattttgcagattggtttgagaatagtagtacaacgaattttcaatttaatatgaatgatgatatgaatgatgataataatgataataataataaaattaattattttgagacatatttcaatgaaaaagattgtagtgttaatgttttgacaagtattaatattaataaattgcaagaaataaatgagaaatttgataaattacaaataaaatataagttagataataattttggtattgaagataatagtaatgataataataataatattgatattaattataatgataatgataaattaattgagaatggtggtaagtaattatttgaataattttgatttttgtattgatgataatgataatttaaataaggaagaatttgaatttgatataagtagttttgataatttattcaatataagagattgggagaatattggtgatatatttaataatggaattgattcatttatttagtttgtatatatatacagggatattataatattataactaattaattaattaattattttttatttttataaccttcatattcaggagaataaacaccatttaaaatacttaattctaataattttgctcttttctcttcttcttcttttctaattaaattttcaaaagctataacttctctttcagctctaaaagctgcagcagctgaaatccaaattgtatgatagaaaactctaatacggaaaccgaaagctctataaagaggagaacgccaacgtataaataattctgatggaattgaaatcattgcaccatataaaccaccaattaaagttgattttataataacttgttgtaaacgatttaaatgttcctttgaagtatgatgtaaatttggatttgagaatgaaccatcgaaatgttcatttgaatttgtaattttagtattttcttcagtcatttgggtatataaagagatgatatgatgatgatataaagatcaacttttattataaatcgactgataatcaagatgcatgttaatataaccggggtttgagaggtattatcaaatcatatgatattacgtaatatacaacattataattatagagataaagaatcaattacaagtttcttaacagtttcattatatttatctttattatttctccataaaacagcagcatcaatattagcaggagaatttggatttggatcagcaatcattgaagaaactgataataaaattttttcaatactttgtaaaggcccccatctttcatcagctgattcataattaagtggatcattaccaggagaatgtaagattgatatacaaactttaccatctttataaatatttggatggaaaattggagttaaaaatttcattgttggaggagatagaggataatcagaagggaaatttaaaattgcttcgaaaataccaaattcataaggggtatcatttggacctgtaattatacaacgccaatgaaataaatcattatcatttaaaggtgaagctattataccatctattggatttttagttatttcctttaattctcttaataatcttttatgagcagttgaaaattttggtggcattattataaataagtattgatatttatcttactatacaaaatagtattaatattaatattagtattagtatagctgtagaattaaattcggggacctgtgagggtatttaaaaagattattgaaaaaaacattcattacgtaatgatataataattacataagcagaaatagacgcatcgactttattacccaattacgtaatacaaatatgccaaaaattgaaaaattgaaaaataccccggagattagaaaatgaaaatgaaaaaatgcgggggacccttttagggaaattccccgggattgattaaaattgtaacactattttatttatttatttattcctgggttattccggataaagtggtttattttatttttattttattatactgtggcaaatcattatctttattattattattttatcttttaatttcatttctattcttttcactcttttcatttatattcaatgggttcagtatctcctaatactcctaatattggtattagtactaatactactactactactactactactactactactaataataataataataatataccaaataacctaaactcaatactaaatcctacttcatcttctcaaaatttatcatctttaaataatattataactcctctctctaataataccaccacaactacaactacaaatacctctacaccaccacgtaaaagatcaaaagtttctcgtgcttgtgatgaatgtaggaggaaaaaaattagatgtaatgcaattttcgatataaattcaaattcaattttaaaaatttgtacaaattgtgataaaaataatgataattgtacttttacaagaattcctttaaagagaggtccaagtaaaggttataataaaagattatctgatgatgatatattagataatattaatattaataataacgattcacctcaaattgttataaggcgaaggagtaattctcaaaagattagtaaatcaattagtattaataataatgataccatagataatatcaatactaataccaataccaacaacaatgtaactttaccacctttgaattcattatcaatcccaaatcaaaatcaatcaccattacaatctcaatcacaatctcagtccccacaacaacaatctcaatctcaacaaaaattacctcaacatgacatgttttggaaagtaccaacttcaatgccaacttttaatccaaatttattatctcatgataggaaaaattcagttgattcaacaaattcttcatatagtaattcatcatttaattcttattcaaataaaaatcttttatttaatgcaaataataaatcaggttcatcatttaatggaattgaaaattctgatagtgaagatgattttacaaataattcaaataatttaaataataataattcaagattctctcgtgttaattatcaaataccaaccaatttagtaaattcaaataattctccaagagtttcctttgataatgatagagagagatcaagtatttcgtcaattttatcaaataattcatcaattttaccaaaaattaatttacctaatagaaataataataaaaatataattattaacatgaatgaaattaataatttattagataattattataatacattatatcaagaataccctttactaccatcaatagaaattatgaaaaattcaattagtaaattaattgataaccctgattataataaaatattagaattattaataaattctttaaattcttttaatataaagacaattatattaaataataatttacaaaaatttgaaatttcaattataactcaaaatatttttaaattatttgaaactataacttcattatataatgaaagatcaattttaattaaatctgatgaatgtaaaattgttttcacatcaatcttaactttattaaattatgcaattgttttatcaggtactgattattcattaggttttggaattgcattctcatttttcaaagattgggggattttcaaagaaaattatgaaagtgaaagttttataaatttaattcaattagttataattgataatttacatacattatattttggagttccaagaagttcaactattggtttagccattgattcatcatttattgaaataattctaaataaaacaaaattaaaattaaattattcaaataatttagaaattgaatggatttcaattggtctttatttgattactttaaataatgatttacaacaattagatagtattgaaaaattagaattaattaaaattactggtacaaaatataaatttatgtcaattattaaattatattatgaacttttcatttattttaaaaaattagaaaatgaatttcaaactattaccaataataatagcaaaacatccaattcttcattagatgaaaatttgaaaatatttatttataacattgaaattgatttactgaaaataattaaaaaaatcacaaatttaattgatgaacaactcgatgatcttgaattatgtaaatccaatgttttaattgcaattattttaattaaatgttatagaatatcgaaaattaatgaaattttaattaaatcaattatcaatttaaataatatattagaaccatcattaaacaattcaattaatagaagtagaagtaatagtacaaacagttcaattgattcaacaatatggaataatattacaaattcaattaataatttagcagattcaacatttacaaataatttatcaaattttaatagtagattattaaaattaaatgaaaatattgatttaaatttaaagagatgttttaatattaaacatattaataaccattgtaatgaattattaatgaaacttcaattgatgaataatattgaaataattataccaaggacaaataataataaaaaatctattgaatattcaattgttatacataattggattagattaactaatgcatattttacaggtgaaataactagagagggtattaatggttggtgttatatttagaatatttatagaacaaagaacacagaaatgaattatatttatttagaaattatataataataatattatttaatgattaatcaattaacgacaaaaagaacagctagaatacatgcataatgatgtctttataaaacacgatcactatttaatttaacaccaggtactgcattatctacaacaccttcatttggttcaacatctaacagtgtattctttggacgatttgaaccatcatcatcaacaagtttattctgtgacagattttcagcttgaccattagataatgaatgatataaagtattcttttcattaccttttggtacttctaataaatctgcacctgaaggtgaattttccttttgagcatatactgcaccttgttcattagagattgtatccatcatacgattacgtggtttatcatcagttggtacaccaaattgttgtctattattctctgtttctaataatctattcttattatcttcaccacttttatgaaatttttctttaatcttatcaaatacacccatgattgttatttacggaataattaaataataacaatcagaaataaagcagaggttagaagattaaaggaaaagaaaagaggtacatcgaggtatttatacatctttatgctgtacaaactctaatctggttgaattctatgtattaaaatccagtttcagtaaattaataatattaataataatctgaaagtctatctttaaaaagacctttccccggttcttgttccataatgaccactgacatcacatgttgttaattgttacataattattttattctatgataatataagggtttatatttataatatgtatagattctactcttcatacacaatgttctaactgtagtggtatagtataaagatggtataggtatatcaaattgtatatcaccctatcggaatgtaatcatgagaaatggcttggcatccgacagtgaaaatgactgattactgagggtttggtaaatttaaagattccgttactgatcgtatacttttctgtagtgggatttaatatataatgaccggatataggttaatacttccaaataatactaataatgatgaaacaaatgtaacaattaaaggtattatatttgatatggatggtacattaactaaaccacaaacatggatgtttggagaaatgagaaatcaattaaatgtaccaaatggaattgatattttaactcatttagattcattaccaacaattaaagataaagaagaagctgaattaaaattaaggttaattgaagaaaaggcaatgattgaacaagaaccaacaattggattatttgaaactttacaaaaattaaataaattagatataaaaacttcaatttgtactcgtaatgtaccaaaaccctgtttcaaaattttgttcaaaatttcttaattatgatccatttatgatgaaatggacatggaatagtattcttacgggacctattgtaactagagaatttaaacctccaaaaccttctgctaaacctctgttacatataattaattcatggaatgttaaatcaaatgaagttataatggttggtgattcaaatgatgatattgatgcaggtttaaatgcaggttgtgcagttattttattaagacatgatgataattatcatgttgaaaaatcttataattttgaaaataataataaattagatgcaattgtaactgatttaaatgaattatataatgttttagaaaatggattatatgttaaatcaagagaatctatttaagttttgaatttgactttaacgaattatataatcacctgaactagatatatatttaacacctttgaaaggttttggattaattgaatcaattaaattaattgatttaactttaataccacttggtacactaccataatgtttatatttaacttttaaaaatttagggaataataatgatttattattatgattatcattatttacatcatttccatcatttgtatcatcattatcatcatcatctgatactgatgctcttaatgtaaatttaccaccaactacaatatctgaatcaaatttccattcataattacccgtctcagttcgtataatagtacctgtactatttcttaaaacttttaaatttgtattatcatttgaaattgaatcctttgatccatattctttattattataattataattatttaaattatctttatcattaaaattatttgatgatattacatttttctctaatttatttgaatctattaataaattagatgtatcaggtaatataatttcaattgataaatctttaatatcttttaaaactgatgatgatgatccattattacttatatttgaattaattgaattacctgtatcaattgaaatttcaaattcattcattttaatacctaaacctttaattaattgaacattaattaatccaatatatttatttatatttaaatcatcttcattctcatgatttaattcaattaaatcaatattatatgataataatttacatttttcatcaggtggtataagttgaattgatttaccatttgaatttttccaaattgatttattaattgatttatgtaatgatggataacaattgtttaaattgaatattgatggtatatttaattgtatatctaatattggattatcagataatgaagttgttaaattcatatgaccatgaattgtagctttttgataacattcattattgatggaataatcattatttgaattaaaaaatgatgatccatttgttgtatatttattatgttttttacttttatgcttttgcttattgttattaatacttggtgttacaattatatcaattgattcatataaatctaagaaaatttcattttgaatattttttatatcaattttcctccaaggtattggattaccagatttttctaaaattgttgaatatttaaaagttgaagtatttgaatttcttgaaaaattattattatgtgaattaccagaaactgatgtcaaagatggtgatgaaatattaacatttttaatatttgaaattgaagaagctgcattattttgaatttgctttgttgcactaacaattttatcaattatactatcatttggtaataattcacgtaattgatttaaatctattataaaaggtacagatgcatcaacaagttcttgtaataacataattattctatgagaattaatttgaattttatgtggtgataaaattgatgtttgtaacattaatttagttgcatcaactaaaatttccaaaaatgaaatatattgtaaaggattgtaggaattagcaatataatttttaatctttggttgtttaactgattttggtcatttaatgattcttcatagttattatcactattactatcactattagaactaacttcatcatcatcttcttcttcctcctcttcatcatcagaaacaacatcaattgtagagggacgtatttctccagtaacagcaaagtacactcgatcaactaaacaccataccaatatagtgttattatcaattaatataaaattgctattattattattattactactactaccattactattattttcattatttgcagatgcaattgaatttgatacgataattggaggaattgaatgaccaattgaagtattagttaatgggaaatgaagtactggtagatactcattatccagtatgtatatagcatccaaaagacccatacccagtagtataattcagtgatgacagtccttctactactaataatccacctacaattgaagcgaggtgtcagtataatacaatttacaacgtcaatgagggctttcacgaattttcgcaattaagagcgccactatataaagacgaaatgatttccagcttttttttcattcctcgattgccctttttttgcaaatcatattggctcagctattttttattattatatacacaacaacaccttaatgtctcgtcttgatcgtcttgccactttgttagagactggttctaatgctatagtgaggaacactgctgctgatcaattagcagatttggctaaacaacatcctcatgatgctttatccctcttggctcgtgtttatcccttcttattaaataaacgttgggaaactagaactgcagctgcaagagcttttggtggaattgtatctcatatacccaaatgggatcctaatcaaaatgatcatgatcataatgatgatcatgataatactcctgatataaagaaagaatcaaatgatgaaaatgactttgactcagaattagacacgaaactgaaaaatttaatggataatgatcaatatgaatcaatgttagtatccttcgaagattacaatttagaagaaattttagattctggttgtgtattattatcaacttcaactgatgcctttgatctatttaaaaatgtcgtaaaaaatgaccttgatcaaaataagcgtattaaaatttctgaatttactaaaaaaacattctttaatacaatgaatgaaactccaaatattaaaactgaagttaaatctgaagataaccataacaataataacacagagattaaaactgaaattaaatcagaattcgaacaaaatcctcaaattaaaactgaaataaaggtagaagttaaatcagaaccttgttctaaagtttcagctagaatgaaagcattggctaaacgtaaagctaaattgaatggtaataaatcagttaatgtcgatatcactcaaagtttagtctctaatcaattggaaaaatcaaatcttattaatgataattcatcgaacaaacattcccttgatataacatcacaacaaaatggtgaaaaattagttattgagaataaaccattacaagaaacaatttcttcatttgctaaatttgaaaatcatgtttggatattacaaggtgtttatgaattacttattaaatctttattctctccaaattgggaaattagacatggtgcaaccttaggtttacgtgaaattattaagcataaagatcaagcgtattcaactggtcgtgtaaagggtaaaactagagctgaaaatgatatacgtaataaggatactcttcatgatttgattgttagattattagctatttttgcaatggatagatttggtgattatgtatctgatacagttattgtaccaattagagaaaatgctgcacaagttttagctgctgttattagatgggtagatgatccaactcttgaacttagttttcaggtgcgttatgtcaattgattcaacaaaatgaaattaaaaaacaatgttgggaagcaaaacatggtggtttacttggtcttagatattttgtctcaattaaacctgaatttttattatctaataatgatttccttttacaaacttcaaacatagtcattaactgtttaagagggaatcctgatgatatagataaagatgatgatattcaaactgttgctgcttcaatcttattaccgataactaatcaaataatgatcttacaaaaagatttaatcaaagaattattatccgttttatggaactgtttagtcgatttgaaggatgatttagctgcagctactggttcagttatggacttattaggtagtctatgtactgaaaaaatagtttctgatatattatatgaaatgtcattaaattcaactgattggaatttctcgaaattagttccaagattatatccctttttacgtcatagtttatcaaatgttagaaaatcagtcttaaagacattaatctcatttgttgaaatggatacaacaaataataatattgaacattcaatgcatgattgggttaatgatcgaatattaagattaatttttcaaaatttattaatggaaagaaatgatgaaattttagaattaagttctcaattatatgaaaaactaattaatcatttaacttcaaaatcattcaattgattctatatttttaaaccatattccttcattaattgatttaatgataactccaattggtttaccaagattcaattattcaatgaatccatctaatattatacgtccatctggtcaatcaatgaatatgaatgatattcaattaacaggtcttaattataaaaataattcatatggaagatcaagtttatctgataattcaagaaaaaataaaagaaaagattcttcaactggtaatgatttcaaaaaggataaaaaccaaatttctcttggtatacctgaatctgaatatgatctgcatgttaatattgatgctccaatgattaattgtgatgttacgttagtttcatttgatacaatttataaaacaagattatactctgcaaaagcaatgggtgaaacattatccagatttaccaatgttgataatatttttaatgtcttcaatttaatattagtaaatttgaagtcaaattttttaacctcaagattaatatcagcatggattattaatgaatttttcaataatgttataaaacaaggtaaaattgatggtgttgattattctaaaatttcaaattttatttctccatatttattagaatttcttacagctcctaaaacatcacttccatttttcaaagaaattgttccattattaagaactactagatcacattcaacttatatgctttcattatttaaagaacatgcacatttatcatcctctaaaattaaaagtatagcagttttagttacaggtgaaaatgatgccggtccaggtgcattttcaattaatgatgccaaagatttagtctcaaattggtttccaaatgtttataaatcattaagtgcaagtatcagaatttcatttggtaagtcatttgaactttccaaagatcgcgttcaattaagcattgaagaagttgaaaatgaatacaatagtagattaaattctgttaatgcatcaattgctggtgcttatattcattccattgtatttgatgataataataaagaaaataagttaccaaataagcttaatccaatcattagatcattaatggatggtattaaattaactgaaagtgaattaattcaaaaatatatttcaattgatgttgcttatctaatcaataaattaattgaagaagatagaagaaatatttctgataaaatggttaagaatattgcgggtttcttatgtgttgatcctgttgaagttcctgaaattacaacatttaaggatttcaaaggtattttaagtttggttagagatggtagagatttagttgctaataatgatactgatccaaaatcaaagaagtacaaatgaaaatgatgaaaaaatcaactgttgactatgttattaaaggtgcaattgtgaagagaagaggtggtaaatatactttagaatcattggttgaacttttcaaggaaagtttatttgataaattaccaaaattaaaatcattgatgttagaacctttgaatttattaaatggtaatattaatgaattatcagataaagatggtcaaagtattattgacttcgtatgaattaatcaaaatattatttccagtggatttcacgtaatttacaagatgatgttttatccaatattgatatcattattaaaggattaaattgtgaaaaatcagtttttagatattcatcagcgaaatgtttagcaagtataattaataccatcccaaccagaggatttcaacttttagttgaaagggttttaccattaatgaaaaatccaattagagtagaggatagacaaggttcaattgaatgtgtttatcatgttgttcaattaatggattctaaaattttaccttatattgtgtttttaattgttccgattttaggtagaatgagtgattcaaataatgatattagattaatttcagcatcaacatttgcacaaattatcaaacttgttccattagaatcaggtattccagatcctgttgatatgccagaaagtttattagaaggtagacaaagagaaagagaatttttaaatcaaatgatggatccaagtaaaattgaaacattttcattgcctgttagtatccaagcaacattgagaaaatatcaacaagatggtgttaactggttatatttccttaataaatatcatttacatggtattttatgtgatgatatgggtttaggtaaaaccttacaaactatttgtatgatttcaagtgatcattatatgagaaatgaaagatatttaaaggaaaaaaatgaggaagatagaaaattaccatcattaattgtttgtccaccatcattaacaggtcattgggaacaagaatttaatcaatatgcatcatttatgaaagttgttgtttatgcaggtccaccaagtgttcgtaataaattaaaggttgaaattaaaaataatctaaaggatattgatattgttgtttcatcatatgatgttgttagaaatgatgttgaatttttgaaaaatattgattttaattactatgttttagatgaaggtcatattattaagaatccaaagtctgcattaagtaaaagtgtcaaaatgattaatgctaatcacagattaattttaagtggtacaccaattcaaaataatgttgttgaattatggagtttatttgatttcttaatgcctggatttttaggtacatataaacaatttgatactaaatttgctaaaccaattgcattatcaagaaaaagtaaaggtaagaaagaacaagagaatggtgcattagttttagaaagtttacataagcaagtattaccatttatgctgagaagattaaaggaagatgttttaggagatttaccgccaaagattattcaagattattattgtaatttatccaatttacagaagcaactttataaagatttcattcaaaagcaaaagaagaatgttattagtgactattgaaaatagtaataatttagaagatgatgaagcagagaataataaaggtgatccaaagcaacatgttttccaagttttacaatatatgagaaaattatgtaatcatccatcattagttttaactaaagatcatccacaattttatgaggtatgttcatatttaaagaaatataatatgaaacttgaagatattgaacatgcaccaaaattattagcattaaagaatttattaaaagaatgtggtattggattaattggtaatgaaagtaatgttatttcacaacatagagcattagttttctgtcaaatgaaggatatgttagatatagttgaaaatgaattattaaagaaacatatgccaaatgttacatatttaagaatggatggattcaacatgatgcaagatatagacaaaatattgttaaaaaatttaatgatgatccatcaattgatttattattattaacaacgaaagttggtggtttaggattaaatttaactggtgctgatacagttatatttgttgaacatgattggaatccaatgaatgatttacaagctatggatagagcacatagattaggacaaaagagagttgttaatgtttatagattaattactaaggatacattagaggagaaaattatgggattacaaaaatttaaaatgaatattgcatcaagtattgttaatcaacaaaatagtggattagcatcaatggatacacatcaattattagatttatttgatagtaatttagatgataataatagtaataatgaagaaaatgaaaatagtgaatcaaatggtaataaacgtaataaggataaggataatgatgatattacagatgaaggtggattaggtggtaaggcaggtaatgcagttaaagaattaggagaattatgggatactaaacaatatgaggaagagtataacttgaattcatttattaaaacattgaaatgattattatgtaactatttaataaaataaaattttatagaccttttgtaatgataatacagacttgtaagtataatttgctgagccagtcagttacgtaatcccatgatacggatataagagaatagcagttacgtaattgggaaataaatgaaaagaaaaagaaacgagcgaagaggaaataaaataccgttattattattttagtaatagtaaaataattatgatcttattaatgttatacgcccccttgacctatcgcctcgcttgttctaataataatcatatatagcatgttgaaatagtcggacccgctatttcccgatcaaataataatataataatatatatgataatatgacagtggcaatggatagacaatagagaatgataatcaaagggtaaattaaatatatagaaaataaccggttcctattgttgcagcagagttcctggctgtgtttttgctattaattttttaattttctataattttctaatttttttagcttttttaactttttaccaacttttactaggacgtggccctattgttttggtatttttattctattttgctttatttatttgctttcacagattcaccagttttcagtctcctttttttctggtggacctttttcgttatttgttttgtttgtttgtttgttgtattcttcttttatttgtatctggattatttaactgttccttattaacacactcatactcacactcacataccagtagtacctcattggagttttatattcatttgccgaatacagttaaataaataataataataattaaattaaataaataaacaatcaaataaatacttaaaaacaaatcataacacatactcccctatctatacaaatgtcaaatctttatgataaaaaattcatcgatcaatgtgcaaatacttggattgatataggttcatgtgctgatacacttggacaagttgaaaaagctgttgaagctttctcaactgctttacgttattctcctaataatgcaaaagctttaactcatttagctcatgtttatcgtacaagagatgcttatgctgaagctgctgatttatatagaagagctttagcattagatcaacataatggtgaaacttggggtttattaggtcattgttatttaatgttagatgatttacaatctgcttatactgcttatcaacaagctttacttaatttacaaaatttatcagttccaaaattatggcatggtattggtattttatatgatagatatggttcattagaatatgctgaagaagcatttgttagagttttagaaatggatccaaattttgataaagcaaatgaagtttattttagattaggtattatttataaattacaaaataaattacaaaaagctttagaatgtttccaatatattttaaatactcctcctgctcctttaactcaaactgatgtttggtttcaaattggtactgttttagaacaaaatagagattttattggttcaaaagatgcttatgaaagagttttacaatcaagtccaaatcattctaaagttttacaacaattaggtggtttatattcacaatctgatgctcctttctatgatttagatattgctttacaattattaactcaatcaattgaattaaataatactgatgcaaattcttggtattatttaggtagagtttatatgtcaaaacaagattatccaaatgcttatgaagctttccaacatgcagttaatttagattcaagaaatccaactttttggtgttcaattggtgttttatattataaaatttctcaatataaagatgctttagatgcttatacaagagcaattcgtttaaatccttatttatctgaagtttggtatgatttaggtactttatatgaaacttgtaataatcaaattggtgatgctttagatgcttatagaagagctgcttcattagatcctgaaaatcctcatattgctgaaagattaatgcaattatcaaaatatgaaaaagaaggtggtaatttaccacctccaattcaatctcaacatcaattatcaatgccatctcatcaaatgattcaacaacaacaacaacaacaagttcaacaacaacaacaacaagctcaacaacaacaacaaattttatcattacctcaacaacaacaaccaattattcaacaatctcaattacctttacaatcacaactttatcaacaacctcaatcatttgatctaaatcaaaaaatttcaactgaaattaaatcaaatgagaaaaagagggaatcttcaaaagataaaaagaaagataaagaagaaaagaagaaagaaaaggaaaagaaaaaggaaaaaaagaaagagaaggaaactgagaaagttgaaaaagctgaaaaagctgaaaaggttgaaaaagttgaaaaagttgaaaatattgggaaatttgaaaatgaaccaaatattaaaaaaactgaaactgaaactgaaattgtcaataaacctgaaacaaatggtttaacaactataaaagttactgaaccaaaacttgattcaaaaattattgaagaaaagcaatcagttgaatcaaataatgttattccaacaacaactaatataactgcacctgccactaaggaaaccacaccaattaccgaatctgaaacttcaaataaacgtcaattagatgatgatgcaccaaccagtgaagataaaaaaattaaattagatgatggaaataaaaaagaagttgttgctgatgttacaattgatgcaccaattgaacctacagatgttgctccttccgctcctgctactgatgttaaagaaactacaactgatgcaacttctgctgctgcacctgttgttgaagaatctaaatctgaaccaactgtcacaccggaagaaatcaaacctgaagacacattagttccattaaagacaattgatttaaaaccaattgatgcagatgatattaaagaattaaaatctgttgataatgttgaagaaattgaaaatgatcaaaaattagaaaaattaaataattcaaattctaattcaaattcacattcaaattctattgataataatgataaaactgatttgattaatgaagaacataaaattcgtgaagttgaagaagatgaaaattacgatgattaatttatatgtaaaacttaaaaatagtgtatattagccatgtaatataaattttatcaagaaatggaaagaaatatataaaaaatgtgtataaaagaaacgataatatttatgattattcaataactttatctaaaaactgagcaattcgacgtaatgtatcttccttaatattatcaggtacactttctatacctttatcctgtaattgtgcaattaatttacctaattgtaattgtttatcatctgtatgttcaattttattaactgttaaatttaaaaattcatcataccaaccagaatttcgtaattctctctctaaatgattataaatttcagcatatgcacctgattgaacaagttcaccctgtattctagtatgtaagtcttcgtttgacatcgtttgtgtggtgataatatcaacccaaaattgtaaataaatgaatcaacgttctttaccgtctcccccagaatacacaaaatgacgtttatattaatatactgatgattaagtaatcataattcaaacattacacctccagtgaatcgtactcagtcattcctttcgatttaatgtttttaagattatcaaagagactatcatttaaatcatcatcggttaaacaaaagatgtcagcaaataattattccaaagcatcagaattattaaatcctaagagaacaaatgcaaaaataacttcaataactccattaaataatgatcaatcaagatttattaaacttaaaaaaattgattatattacaccattaggtgataaagcagtatgggaaatggcaactagatctacaagaccaattgattctaaagttgatgcagttattattataccagttttaaaggatggtgaaggtaataaacaattagttatttgttagacaatttcgtccaccaattggtggtatatgtgttgaattcccagcaggtttaattgatccaaatgattcaattgaaagttgtgcattaagagaattaaaggaagaaactggttatattggtaaaattcgtcgtaaatcaaatattttatggagtgatccaggtttagcagatgcaaattgtataattgtttgggttgatgttgatttaacaattgatgaaaatattaatccaaaacctcattggatggatcatgaagtaattgaagttgttaaagttaattttaaagatgttgcaaaaactattgatgattggtcaaatcaaggttatttaattgattcaaaagttcaatcattcatatttggaatgagtctgaatgattaatccttgaaaaaatatagtatattacaattacaattacaatataaataattttatttataatttaacgaatgtatctttgacgtgtttctctaacaggtagtaagatggtttgaaaaactttatttcttaaaattctatctcttggactatcaatatgaaaatcatatccgtttcctctggtagaattcaaaagctttattgttttgtgaaaatactgttaaaccaataccggttatttctaaatatggatcatttagatcattaatttcttcaaaataatcaaaccataatttccttaattctcttgatgcatttagttctttaacaattatttctaacaagtttagaagttcaggttcctaatcctttattccttaattgtggcattaattgaatttcatatagatataacaatgacaattcatcatctttaacaagattaaatgataaaaatccactaatttttccattttctttaattagtaaatacacaagaccttcctctttcatctcatcgactttttctgtcttccaatcgtgtccctttataatggtatataacattcctaaattttgatccaataatgttaaacaactattaaaatcttcatctgataatttctctgattctatgacttcaatatcaacattctctttgaatttcttatccttgataatggatcttactatcttagcagcaatagtagcttctaacccgtccatcctgatattgatataccctagatatcactatactataccctataataacccacagaaaacattcagttgtccaagtaacataatgaaatctatcggaattacttcccttttgggcgaatttttcatgtcaccacagtgatttcttatcagagaggccgagatcaattgatcgatccactaatcattacaacagctttcttttcatactgaccaccacatcttcattcaacaatgcttgtcattaatgaaaaaacagttacaaagatatttgcaggtttatcaccaaagggtgtccttaaatatcaagagagtttgataaaaggattattagaatatcaatcagataattcaattataccaccaagaattgtcagtacaacaccatattgtacacatcttttcatggcatcaactggttcacgtgtcggtatgaaggctataactggctcaaaggaaggatttaaaggtattacaacaattttagataaaaataatggattatccattaggtattattaattgtacaacattaacagcatttcgtactgctttatgtaatacattaccattagttaaatattatccaattaatgaaacttattcaaataatgaaacattaattgcatttggtgttggtgatcaagcaatttggcatattcgtttatctttaattctttatccaaaacgttttaaaactgttattatttcaaatagaacagtttcaaaagctgaaaaattatgtgaatcatttagaattgaatatcctaatgttgaatttaaatcattaggattatattcaggtgaaaatgatgatccattacttgaacatttcaaaactgctacagttgttttcacttgtattccaacaagtgtaccaactgtatcaattgatttaattaataaatgtgaaaaatcttgctttattggtgcaattggttcatataaacctcatatgacagaaattgatggtgaagttttatttaaacatgttattgataaaggtgggaagataattgttgattcaaaggaacattgtttacatgaagcaggtgaatttatcattaataaagttcaagaggataagttaattgatattgctaccctttatagtgatgaatcatctatcaaagagttacgtaagcagaagatagttatatctaaattagttggtctctgtattatggatgtatgggttggaagtgaatgtcttgaatccgctaaaagggatggccttggtattgaaattgaagatttctagtttaatgtatgtatgtatttatgttcatgtatattgtatagacatttactataatgtaatagagtatatattagaaactatgtaatagaatctttacttctaaatttccgaccaatgttaaatttgcgagagagattttccatagtggaaaagttgaattttccaaattcatgaatttttcaaattatttcaaacagtgaagggttaaagtgaatcctaggattggagaagtaaggagtgtaataaattctgtacataaacagttataacatcaactatgatcagatcacatattcaaagtgagacgtgtttcattctttttaccctctttcaggttgaatgaattcaatagacgtcaaattcaaaataatccaactgtcgaattgttagaacaaaattataatgaattacaaactagtattaaagcaactgaaacgaataaatctgttaatccgaatcaaatattgaaatataaaaaagtatccaaatatgatttcagtaaaaatttaattccagaaagtgaaacactactctcatattcattgaatcaaactgatattccactatttaaatacgaaaatatagatcaacaatatccatatgatatagccaatagtactgaaagatttatagctgttgtgaaacatttagtaagtataccagacttcaaaacatttgtatgatattttaaaattaaattgttccaaaatatcttctttaagaaatcaattgtcatctaacgatatttcagttatcattaaaagagttacaatctacaattcaaatttaaataaaaacttacgttttcttacaaagaataaatctgttctcaataaatcttcaaaatattatgctcaacatattaaaaaatgcaatgaaatttctagaactacatatgtctcaactagaagtatttttaatcaactctgtactcatatgaatttaaagacttctgattatgaaaatataataagttactattatcaaatgaacaaatttgaaaaatgtatcgatgttatttcacaatttgaaactaaatcaataaattcaaatagtttacatctaactaataaaatctgggcaattaaacttgaaatattatcttatactactgttctattttggagattatttggaaatccaatttatagagtaagcacatccaaaaacttaaatagtaattatacttatccacatcatacccataatttccaaattttaatgcaacgatatgaaaatgataaattaaaatataaattacctgatgatcttacaattgtaagtgttctcattaaaggacttgggaaacattgtgatattaatgctctcaataaattaattgaatcatattggggtattaagataaatattgataatgaatttaataaagttgaatttttgaaacattttaatataaataaaaatgtcccaagtttattatggccaaatgaagatattttaataagtattttattagcgtatgctaaaaatggctatgtttcacttgctattgaaataaataatttaattattgaaaagtattattcaagtaataataataattcacgttttgttaaatattgggaaactgcattattatcaactggtttatttggtgaagcagttgaaattcaattagcagcttcattgaaaaatgtaattgataaagatcttgatgatcagaaaattgatgaaagtataatgaacttaagatataaattatttgatgatgtttataaaatggctgaaaaatcagttggttcaaaaaatattactagagagatgattaatttaaagattaaatactcaacaagtgatgcattaatgaatcaattaccaattgtttatagacaaacacgacatattgataataatagaacacgttcaaattatgcagttaatattaatacattatacaattatgttaaacaatgttgtatagaattagcacgtcgtggtaaatttcttgatgcaaatactttaattgacaattttgttacatctgagacacaaattaaaaaattaaaggaaatgttagctgaaatgcaagaaatttatgctagagaaagagtaaggagggatgaagaaaaaagacgtatagtggatgatgataatgattttgaattatggtgattcatttattaccaacttgttaataattatagaaaacgagattaatagagatttgtacttgtttatttatttaattacagtaatgactaaaatattctatgtgatatgcaatagagaatgtaaagtaataaaattagaaaatagcaacttaatcattaagagcaatttgattaaagaattataaaccattttgtacttaactaaataaatgtgggaatgataaaaaaaattaatagcagaagaatttgaagaaggtatatattataggattggaacaagttcgtttgaattcatatatttactagaaaatacccatatccatctaaaccaaaccatttgtgaataatgtgcccaggtcatagttgaaaaatttaaaaatagactgtttaaatcactatacaatatcaaagatgtatccttaggttgtgatggtaaataatctgcaatatgaatatcataactttcaagcttttcaattaaaaatttactatttgataaccatttgatcattaactcgatatttgtaactaaaaatgatgaatatttgatgaatattttccatgattttaatttgtatgctttaaccttatattgtaaagcgtattgttggattgccataaaaacggatttatggtttggatggttagatacaccatcttcatcaaatgataatagtacaacatctttattatttatactatgttcattttggagtttcttaagttcactctttatagtattgacaacatcactagtttcccaatatattttgatgctatccttataatctaaaactttccatgatgataaattcaacaaattagcagctttttctaattctgttacacgtactgcacctaatccgtcatatccgccatttgataaacaaattaaatgaattttgttattataattagctttttgtaattcaagtatggatggtgtgaaaaacattgattcatcgtctggatgtgctgtaaacaatacaatatgtttattagtaaggccattattaacaattgaaggggcattgatcccattgtagaatcccgtttttaaatatccgtcaacatcaagtaatgatactttttcagttggtagaacgtttggaataattgtggataagaatacccatatcccaaatacaagtatcagcaagtaagaacttctcagaagacccattgtgttgattatttgataaattaaatgagtagactcccttgtttaacatcagaaggtatatacagaattgcacagcttactgtaaaagtcgctagataaatgttcatattacttaatatagaaatgttattactggaaccttccagaaggataagtaagcaagatgattactaataacaagcacatttaccatgcttagaaggtaaagacagctatctctcctacaactataaatagaggtcctaatcccctataccacgatgtgaagttaggaatagtcccttatgaataacgaacgaacaacgaacaatcaacgaatctaaatgaacagctattgaacatctacaatgttcaattagactttcataaggacatcacatcaatacaatggaacatcaattactctataatttatataagaactaccatataagttaactaaacatttatatttaaacatttattcaactatttattatacctagtcacacgcgagttcaccctggttaatgtgtgattttacagatttacagtatctaggatcatccacaagctacatatcaagatggcagtttagtttaaaattaaaacttattaaaaatatcaagttcttaaaagaggttttcatttaaaaagattttaatttcctcaaaatgttccacagaaatacagacaatttttttttaaggtcactttcaacaatcattcaattatgataataatattcatataataattcaaagtcagtttattattcaaataagtttcaaatatttttttcaaattatgttggttttccaaaaatatcttttattcaacagagtcaaaatatcattttcaacaattaaatcaaaggttaacaattaaaaagtttattcatccaagatatttttattacatttatttcattaaggatataattataacgttttcaataaaaagtatgtcaattttaaaacccgaatttattcaaattaatgacaaacattttatcactttttatttcaatttttattccaattttttttacataccgatgttaggtaagtgtatgatacattattacaagctttcaactttcaagtataacattaggcacaaattcaaagaagagataatctcacattaggcaatcaaatatctctagggaaaaatatggtatgtttcagaatcagaaaagaacaaattaggtctctgctagaccaattgagcacaaatcttactttatattcattctgaaaccgaatatctacttttatttattagaaaagttcttttcaatatcattttcaattagcatatctcaaaatctgataagttttactatttttcagtaaattaagtcatttcatggttacacaattcaattcatgttttaacaacggtgttaaatgttggtttaagcacactcagatgctttattttcaataaatcaatacaagatatgacacaatctatgaataccaaatcataaaaatcttggtatattggctacgtactagtgaatatggatcacaagtttaggcatcaaaagacaattttgaagggtaagaattagtttggtcaacaaagaataatcaatttatcccattgatataaatattcatctggtcaaaaagatgacatgcattatagattatgcatcccttcgtgtgttcacctcttagaatcacaaatatgttggttccttttattataaaatcatgatcagtgttcagttttgtcatgaagttataagttctaagagttacaaaaggataccaacgctcattaatcaaaaggcaaattttattaaacaataagttatactagctttcacataaagcatcaatatgaaaagttgaaataatcaagcttgttttacttcctgaatcgaagtttcacagcctttagtttccccaatagtatcattcaatcaaaacgttatatcccaactattcagctaatcaatcactaaattattcattcaaaatatgaatttattcattcgttcatcatatttgcactgagtctctaacaatttgttcatgttgttagtatatatcaatcactcattttttttttcaattcatgggtctgactcttcaacaaaaacgtacccattatgtgcaaataatctttttttttcttcataaatttctgactataatcaaaaatcttttactaaagcattcactaattatccactttcaataaatcattaggatattaaaaattattatgaccttaaaatgattcactcttccaagatccagtttctcaacaaaagggaagatcatattaaattatagaatcatttcaattctgcttcaaattagtttcatctaatatcattcaagtctgttttatcaagaaacggtgcactttttattatctatatcgcattattcaactgtttttcactcaaatgagaattctcgatggttaagattgtcaattaaatcaaatataagtacaatcattatttatgttatcacaaattccaagttcaaacatagtattaaactccattaatgttaaaaccaattagagaataagtatgggttatttctttttcccactttataatggttcaaataccatataatataaaattaaaatttctaaacagtggattatcattttaaatccaaattatacatggttcatataccattgaatattgaatttttcttcttaaaaaaaaaaaaaagattgatataatatacaaaaattcaaatgcgacttgttttcaactaaaagtttcgaattataaacaaaagtccttaaggtaataagttcaacaccgaattattcaatagaattaagttcgttctttcttgatatatttttctgttccaaaaatcaaatatctgaatataatatttgatatcaatcaatttctgcatcattacaagagtaccataagtactacaattgctttcatcaaaattctgttctacaattacaaatgaacttgttcacttaatttcatactggttctaaaattccattagatttattaaattattgctcaaatactacaaaggaattaattattaagtgaagatacattacacatttcaaatatgcaaattttattgcacaaggcgtcaagttcattattgattcagttgcttaagtatcattttcatcaattaaaataatcaaatggtttgataacatattttttttacaaaaatgtcattcgttttgatacttattagatatagcattaaaaatgcaactgttttcaaaactatctgcaaaatcgtcttaccaaaatcttatcagttttctctaatatacattttctacctatccaatgacataggtgatatgccttcaatgggctttcaaaatcctatttttccatgccattaattcattatactacaaaacattactacattattatgtttgtcattttccccaattttgccttatattaccaattgcctgaacacacaactttttcaatctatcatctaaattaccaaaactaattcagctataaattgtctttcaatcttaagtcttatcatgaaaaagattatatgccattattcaattattgattcaaaaatttaaccggttattatcaataaaagaagtacttcaacattacattataagatccatttttacaaataaaacaaccaacttcctagtacattcccagaagaattgccactaagtgcttaacattcatctttcaagtaacaaattttctgaaaatgtcatcttttcaagttacaagtcaatataaactcaatctaattcattcaatcaatttacgaaaaactacaaaattatcaactgaacactgacaaattcaaatttcgtttaaaattgatatttcatcatcatattaacagaaaggttttattagttgaatatagtatatcaaatatactgaacatgctcaaatgcatgtgatctcatcagtcggttatcaaaaatcttgattcatccttaagtggcttcatgactaatatttttaataaaacaaaaattccactaccgctgattcacaaacctttaaactaggtcatatcagaatgaattatccaccgtttccatcatataaaattccataaattttcaaatccaagatagcctgaatacaattcagaattaaatcaactaaatcaactaaatcaatttcaatcaagttgtcaaaccaatattttcataaaagcagaaattatatacaactacgaatgactacatccaattttcttttccaatataactccagagtttcttcaaatgcatccagatttcatacaattttcaacttgcgggggagaatatcctcctcatattaattcactattatcagaatcaagtgtgaatttatacattagtataatacttcgggtttagcaagcaagatcaatttgaaaattacaatttgaaaatcataaattcaattaaaataatacaaatgaataaacaatcatgttatgaaatcaaatggacttatcgtaatcaataaagttaaccattactattccattatcatatatatcatagtatatatcagtcatagagaagatgcaaatttcatgttttcactatccaaaagctataaaacaattagtattctaactcaatataaattaggtattcatagtcaattatgtaagaagtttagaatgaaaaatcaagcttaaacatgaataaataagaatcaaatttcattataatacaatactcaataatatgaagaaatctaagcaatatccatagatattccaattgacaaaaagttccatttaaaataaagtgtcaaaattagttcaagtcctggagaattaataattaacaataaattcaacaataagaaaagaaaatacaattcatttaccatacagatgttacaaaatattcaaataacataggatgtcatcaatttgataaaatatttcaaaatcttgaacaagtacaatattagtcaattactatcttatcataaatcaaattgaaaagtctatatctactagcgacatcaatcaaatcaactataaaacagaaagcaaacttaaagaaaacatcaaataaaaattaactcccattactgttttcaaaacttgaatcaactgaagattataagaataaataagtatcagttaaacaattacaaataaaaagaaataaacttggtttaatctttcagttttacaaactattctaattcaagttcaagtaatgattaaattagcagaaataattcaaataagagtatacaatcattaatattcaatagaagcagattagtaggcatcatataggccaataatcatacattgccatttaaagaacagaagctaaataagcaaggcaatattcatactaaatttacaatttaaatccaattttcattatttacaaattactcaatttcattatttacaaattactcaatttttattatttacaaattcaattgaaatttattatttacaaaatcttacaatatcaattcaattatgcaattaatgcaatattattcaaaaattaatacaagtcaagaaaagtcttttaatatacaacatctaagctttgaacatattatacaattatcataaattattcaaatagattaggttttcatgttataaaaatgaagtaaaagttcaagcattacaattaaattattaaacattattactgatacaatgttgtattattatcatcaagaagacgttagagagagaagatatcatgctttacgggggagtgtaaaagtcgctagataaatgttcatattacctaatatagaaatgttattactggaaccttccagaaggataagtaagcaagatgattactaataacaagcacatttaccatgcttagaaggtaaagacagctatctctcctacaactataaatagaggtcctaatcccctataccacgatgtgaagttaggaatagtcccttatgaataacgaacgaacaacgaacaatcaacgaatctaaatgaacagctattgaacatctacaatgttcaattagactttcataaggacatcacatcaatacaatggaacatcaattactctataatttatataagaactaccatataagttaactaaacatttatatttaaacatttattcaactatttattatacctagtcacacgcgagttcaccctggttaatgtgtgattttacacttacctcaaaaaatttggatttcaccaaatcgaagatttttcaacgtttaacatggcagtagagactttaatctcttttctcctgggtgtagttcaagtatcatcactagtcaccatgcgtctctgttgtttgagggggagtcgtcgctatatttctacaggtagaccatttgaaactttggatactttccaagttcaatcagctccacagcttttacgtgatattaaaaagatgaatcctgaaactgttgtgtctccctttgttttattagatgctaatgtagcaataaatcgagttttgaatggttcttttaaacataatattgttgatgaggcagatttatcaaaatatgattatagtttggctgttaaaactaacgaagatgatttttatgattttaatgatgatatttcaaatattatcaagtgggaggaaaaatacaatcaaactacatacgaacatatactgccaggtaaatcaccatcatttgatattgtccagtcacttaaagaagatatacttttaacttttaagtcaaacgattatagtttgtcagaatcaataaattttttatcctctaaatattcaaatttaagtcttgaatcagtaaccatgttttactttaaagttattccccaaataggcgaaacagaaaagattgaaatgataaaacaagcttttggtttcttcaatgataatatattacatttccatgatcatacaatagttgatatttgtcatactttattgtttacagataatgttaaattagttgcaagtatcgttcaagcatataataaattcagtcaatcagacttttttaaaattgttccaatagattttctaaaactatatttggacaaaatgatagagtcgggagatgttactgaatctagacaaattataaataaaattatctctgaaaattacacccctggcttagaaactctaactaaatatttcatgttagcagatgcttcatgtcaaaaggtcaatgttccaaaaattaagaaggaaatgattttcattgttttaacacaagaattaaaagaggttttattgaaagaatctatgattaatgataaaataattgcatcaattgttaattatgtacgtatcaataatattgatttatttatcaaatacttacaaaaaagtcctgaatattataatatcacaaatattcctgatataatattcaaaagaatagaaaattcttcaacttatcaaaggaaatcaaatattcaaaaggcagtgtttttatcaagtataattgatcttttaaattttgatagatcaaaaatctcagatcaatgtaagcacaacctcattaatctatattcagatgcatcatctccattagctgttctttattggtctggactattaacaaaagctttatctggtgaagaaaaatcagaaattttagatcaattgaaaaaagaatctacagaggaagatttagatatcacagagaaattgtaaaaataaataatgacatttttgttctatagtactataactcttttataaaaataatgaatattaataaactattttaggaacatctatcaacgaatcttttttcaatatcaactaaacatgaattgaatttgacatttttaacaacttcaatttgctttctgaatacatcatccttctttggttttgcaaatcctccaatgccgctaaaatcaggttgtttttgttgattttcggtaattgctctaccaccactctttagtctggttgaaatactaactaagaaatcagtttcaggattactaaacatacttgaaataccgaataatccagattttatagctttacttaacccttcaactcctaaaagattaacaaaataccaactgataccagtcacataagaaacatcgagatctggtgtagaaattgatgattgaaacatggatttaaaatttgatgttaaggcaaatggtaatttcaatacaatataaccacggaataaatgtgacatataaaataaaagtattggttgtggtaagtaattcaaaagatttgacttcataccattccaaaggaactcatgcataccagcttgactgaatggattttgaaattcttcattggtatcatcaatatctttactcttctttttattggtttttgcatcattggatgttgtttcttcaagaattttattcaagttggcttgtttactgtataaatcaacaagaactgactttttactttcccattcagattgactcaaacatgaccatgaattagtagtggaaataacacatcgttgtaaatgttgatcttctcgtactgtttccattttatccaattgaggtttaggtgaaattaacacagttaacatttctcgtagtatatgcactaatagcataataatagttattggtaacaaaacatgggttttgattttaggatctagtgtcagtattgtctcgtatgtcgacatgatgttatcaattgattaaaagagactgtcaatgaagagattcggattcaaaatatgatatgaattttcaacaatttatacaatacaccggctataataaatttaaatttttctctttattgttaactcttttctttctacaaagaacaatgaagattcgtgttgcagcagtacaattgaactcaattttaggtaatgttgaagagaatatgaccaaagctatgaaaatgttagaacaagcatttccaacatctaaaccaaaaccggatttaattattttacctgaacttgcacttaccggatataactttaaatcaccacaacatatttcaccattccttgagtatatgggtaagggtaaatcatttgattttgctaaggagatatcgaataaatgggattgttttacattattaggatatcctgaaaaatttaggaatttaaaattaaatgaagataagatttataactcagctatattagttgattctaatggtaatgtaatacataattatagaaaaacacatttatatgaaactgataaaacatgggggtctagtgaatcacctgaaggatttcaatcatttgatttaaatattaaagataagaatattaagagtacagttggaatttgtatggatttaaatccttatgaatttaaagcaccatttgaatcttatgaatttgctaattttgcagctaaggaaaaatgtcaattgattttaattccaacagcatggatgaattctaattgggatgaaaaatggagtgatgaacaagtcaaagcatttaagaaaatatatgattcaaataatgaaattgaaatgaatttggatcatgatataatgaaggatagtagaatattgtataatttacctgatatgaaagacccaaataattttacaataaatgaagttgatggtagtactggtagatattgggttattagattgaatccactatattccaaagaacatagagattatacacaatgtgttgtagtttgtaatagaagtggtatggaagataaattaatgtacgcaggtacaagtagtatgtactccttttttggaggagagatgaatacttcagatgaaggagtttccattgattttaaagttgaaggtagtttaaagcaagggactgaaggagtcctttgtagggagatagaaatttgaattggtatacgaaagtttaagggtacagtatatagatatagattgtttataatacaaataaaaagtttgagtcgtttagttgactatatgttacacatagtttgaaattttaagctgatgattcagttgatgctttttcaggaattgcttcatcgttatgttcattttcaacatcttttggaatcttatcatcatcattttcttctggtgcatcttcagattcaaacaaattagctgattttgtttctgaattgtttaaatttttagaagcagaatctgattcatgatttgactcactgtgttcattttcttttgagtgtgaattttcttcaatttcaccttgttcttcttcttcctcttcctcttcgttatcttcttcttctagcattgtagttaattgttccatataagattcaacttgttttgaatttttttgatttgaaagaattgataaaaatgttttaatatgagatttttgttgttcaatttctctataagctttacttaattctgattttaatttatcatttgaaatagataattcattaattgcttgatcagttataattttttctaaagtccatttacttaataaagcttcttcattatcttttaatcttctaatatattcagaagctttctttataatttgagctttatttgtatgacttgttggtactaaatcttgtaattctttgatagcattattaattgtttctcttctacgtctttcaacttctttatgatttaattttttcattttaattattgccttttgagatatactttcagaatcatcatcctttggtaaatcttcagaatttaaagacagtatatttttaacagcctcagaaacagaatttttatcatttgaaggatcaagattattaatttcaggatcaattgaaggatccgctaattcagttgagccatttttttcattagattcatcatctgcttttccttcactattttcggcagctttagatagttctttatcctccgcttctttacctttttcagtttccttatcattagtttctttatctccagatttatcctccactactttatcttcagttcctttacttcccgtttccttaccttcggtatctttatttactacgccttcattatcatctttgctgttgttgttattattgtttttctcttggggttcagtagaagtattatcatctatctccaattgaatcttttgcttctttgctaaatgttcagcattaacatcagtttcctcttgatcgggacttcttttcaaatcggttgagttacttaccatcctttgaatcagtattacttacttgttcaagcctccaggggaagaatcaaaataaaaaaaaatcacagagcacgtgttttcagaaaaaaaattttaaggcaatgctttgctttttatagagttttcaaaaaagcgaattttcagtatttttcttatttttttattatgagagtatcacgagacttaaatttgaattttttttattagcgacagtcgttttgttgtaactttgttagaaggtcacgtgaaatgttgtttttaaataaataataaatttattattctaattttttgtgggcatcgctttagttaccaagggaacactgataaatcaccattaatcatcattgattaagcttaatcattgaattatcatactcttattttaataaataacatgtgtagacctgctgtttgcccttcttgtaataaatctacttggattggatgtggacttcatattccagttgctatgagtggtgttccaactgatgaatattgtacttgtggtcatccagatgactcaacaacttcaagagattatcctccaaaagttggtactggtattccaaaatagattcaataataatataatataatataataatttttatataacaatatagcatagtatattacttatttatataatataataaaataatttatttacttataaccaattaattaattaattaaacttctaaattaatcgataattatttagaacgtttgtaaattttcttaaagaatgcagttaaaacttcacccttaaaacctcttgattcatcaatattagaaatcttctcttttaattcagttgcgattttttcttcatattgatgatataattcatcaatctttaatttactgaaaagttccttacaaattgcttcctttgcagaatcttttctaccataattttcatctaaaatttttctctcatctggtgaacaaattttaattgctgtattaataacccatgaacatttattatcttgaatatcagtaccaattttaccaatatcttctggtttaccaaaacaatctaaataatcatcttgaatttgaaaatattcacccaatggaatcaaaacatctctagcttgctttaaatctaattcatcattaatacctgccataaacattgctaatgcaactggtaaataaaatgaataaaatgcggttttataaataacaataaatgagtgtttttcaagtgaaaatttacttaaatcaacatgatcttcaggtgctgtaattaaatctaataattgacccatttcagtttgaaatgtaacttcatggaataaatctaataaatcaatataatatgaatcttttctaaaatatttctttaataaaatataaattgcgccttctaacataaatgcatcattaattgcaatttctttaacaccttcaactctataccaacatggttgtcctcttcttgtaattgattgatccatcatatcatctgcaactaagaaatatgcttgtaataattcaatacaccaacctaaaattgctgctctcttatattctgattcactaaaatcatcataacttttataacctttcagtaaggcatatgtatcaacaactgaaatacctctatttagtttaccacctggtgtattatattctaaatttttttgaaaccatgaaattgcatcatttggcataccattttctcttaaaacatcaagtaattctgtaactaattctgggaaaagttctaaaaacttcttcttacctatttccttatccattgtttgattgtggttattccttaattgataaatcaatgaaataaaagctgagcaatttgatgaattatgatcttataaaatttaatgttgatttttcatgttcctcataatcaaccgttaaatttatacgacaactttatacgacatttcaaaagtcgcgactcttctcttttaacggatgaaaaaaaaatttacatgaaaaaaaaattgaaatttattttttttacaatattaaaaattaaatttcactgaaaattttctttcagtttgatcttagataggtggattataaatagttcttcttaagtcaaagtacagataaatttttaatggctgtaaagaataagggaaattctgttgctgaaaagcaaaaggtgaaaaatgaaaaaccttcaaagaaagataataataaaattgcaaagaaagaagaacctgtagcagaggttttagaagttgaattagtagaagaagatgatgatgaagaggatgaagaggaagacagtgaagatgaaagtgaaagtgaaagtgaagatgaacaagaagttgatctcaatgcattaaatgaaagtgatggtgacgatgatgatgatgatcttgtaaatccaccagttgaaatagaatctcaagaacaagatgatgatgaagatgaagatgaagaagatgtgcccctttcagaagctgagtttgattcagatgcagacgttatttcacataccaaacttaccgttaacaataaagttgcattaaaagatgcactttcaagaatacaaatatcatgggataaacttccatttgatgaaggtcaagcattaacttacagtcaaactgttgaaactgaaattagagatatttatgatgatactgaaagagaattagcatttttcaaacaaggtttagattctgcaattgaaggacgtaaaagaattttagcattaaaaattccgtttgcaagacctgttgattattttgctgaaatggttaaatctgatgaacatatggataaattgaaggctaaattaatcagtgaagcaactgaaaagaaagcaagagaagaagcaagaagacagagacaattaaagaaattcggtaaacaagttcaacatgaaactttacaacaaagacaaaaagaaaagagagaaactttagataaaatcaaatcaatgaaaaagaagagaaagaataatgaaatgggtggtgatgatggttttgatattgcagttgaagaagcaactaatgttggtaatgataaacaaaagaataaaaaacaaaagattcgtcaaaatgttgcatcaaaggcccaatctaaaactaagagaccaggtaagaatagaagaagaaataagaagaaataatctatttcatttagatataattttataaattgaacaaactgtaaattatttatatacgacgtacgaaaaggatacttcattttctttaaactaattcaagttctttaagcatattccatgtttcattactaacatatgaacttaatgaaacttcgtaacttaaacccttacgtcttctagttttcaacatgaaatctctagcagtagcatttaatggaacacgagtaagtaatggaataaagacagtttcatcaaatggatttcctggaacaatatcccacttattaaatatcaattgtggatatgccataccacgagttgatagccttaaatctgtttcaattccaattgattctataacaggaattagtcccatgactttccataaagtggtaccgtcgatcttatcctttgatataacatgacctcttcttctatcaatgattttctctaaaacattaacaacatcagatttacaaatcgactcaatttcatatactggttctaataattttggatatccaatcaatattgctgcatgacatgctttcctaatcatttgaataagttgtgaatcatttctatcagattcttcatctgctaattggataccaattatcttaaatctaacatcattaattggttcgttacataaaggaccttcggaaactgcccattggaatcccttaattatagcatgtttatgttcctttaacaaatttttatcaacttcatcaggtaaagtatcatcgcataataaactagttcctaaatcatcagggccaatactccaaacagatctagctgcaaatgaatcccatttgtgtttatctctcaaagctttagcaatatttcttgatgaatcatttctaatgtctaatattttatttcttaaatcagctgataattctggttcaagtggttctgcaataattgaaactgaatttttattattattagaatagatagttaatttaactctagatgtaccatcggcagtttcattgaacttcaccattggatcactgactttaatttcaataccactatataaaattcttagatcgtgtaataaacaatccatgtaaagttcaccatatcccaatatggaatgttccccattatcttcaactttgacttcacagccaacatatgatctgtttaattttttcaaagattcaatgaattggtttaaatctttaggattatacgcttctactagcaactttgaaaactggtggaaataacatatcatttcccttaattatgaataatggctctgttaatgattcatcaaatattgttgcagttttaacaacaaaattatctaaacctgggcctgatataagtccaatacatcctgcttttaaatctttgacattaaccttatatctaccacaccacatataacatttatttattttttgagtttttgaatcatcgatgttattgattgaataattttcacctagtaactttacgctttgcccttgttttaaagttcctgagtatacacgaactaaaccataaaaatgttcactatcctgagtgtcaactaattttgtgatatgagcaattaaaggtctattagggtcacatttctttatatgttctgcaattaccgaatcccgtggtccagtgtaaaaattttctaacttattgacagcgttatcaattggagtttcaagtgtatccaatacactaactaatggtaatgatggtagaccaaaaaatttgaggaataactccttcaaaaatggtttgaaatctaatttatagacagaacttttcagtcttaatttaaagtgagtttcaaaaaaatcttgtctatctttaggatctaatgaaagtgtatgtgtaaccattttataaattggtgagagtatgaatttaatgaaagttcttgatttagctgatgaaacagggtttgatggcttggtaaagaactttttgttttcatagtatatatctccccaaagtttacgtgaaaaagattcaactgtaactttaagactaggtttaatattattactttcaaagtacttttttgtgaaactttcaagagtaaatattgtgttgaatattgaagatgaaaaacatacattatttagttctggagatagtctaagtgtatcagtccccacatcatggtatatattttgatattttgttaccaacacattaacttgatcaataattcttctgattttatagtatgcatctaatggaggtaatcgaagttccagaataagacgatctatttttgtcagaataagaatcattctggtttttgtttttactgcatattcaattaccaattcaagtgatttggtaacactttcaaccacatcaacgcataatgcaacagtatctgctaatctagctgcaataagcatctcatcgctaaaattactatgacctggtgaatcgatgaaatttaccacagttgatttatgattcatatcggggagtaataacgacatcactgagcttttaattgttattcctcttttcacttcaagaatatgattatcggtatatctaagtttattatctttagttgatttacttctgttagtatctttaaaattatgtgtttgttttattaacatatcaagtatcgatgtttttcctgcatgaagattaccacaaagagcaacattgcgtattctttctgttatatttgataattcccacatatatagtttagtgtatgatgtttctggtagagtattttcttcaatcatgaattctttaaccacattcggctgtacaataggatcattaagactttttgcatctgatgttgctataatcgtttcaacttcgtctccaaaagtatttgagagtgttggattcattgatgcatcatctgctaatataattttatttgattttgagctatcttcaactatttcatcagtcattgaaacatctgaatcactatctgatgaagaatctgaatcgccatttaaagggtttccaaattcatcaaacaacatttcattttcatctttactcatctttcacaactattcttttcgttttctctatactaaaataggcagattatgtataatcattattcaaacacctgtaaattggtttgttgacagagtttttgcaatgtgtgcatgaaaaatatttaacaatatgatatttaattacgtaattgtaaatagatttatgttaagattacgattgttctatactttaaaaagactgtacacaagagctgtgatgtttgctatcacaaacatgtattcatagtaaataatattatcatttaaatcaaaacaacccactatttatgatccattcatattgacataaatattaaaagatttatcctctttctttaaaagaaataagcggttaatcaataatgtccattcagaataagaatatggtgaattagagatataaaatggacctgaatacatcatcaatgattttggacaagttaggttgtaaaacttgatttctagcttttcagatgatgagtcagtagctgattctacagcaaatatcttcttatctgatatacttttcatatttaaagcaactctgcctgaccatttatagtcatcgtaaatcatgtgcaattcagctttcttgccatgtatattaagagaatagcttaatagtgattctgtagttgacacaatagcataccatattttatcttcatctgaataaatagtttcgacactacaaattggaacctcgagctcaattttaaatgtttcatctctgttaaatgtaaatgacaaagtacccgatcttgttccagcggcaagtttgtatttgtcaaaaattgaaaagcagagtatctcatcttcagttgagtatagttcatgaatgccaccattccggtgaaatcttttgattttatattttgaattagttaagagtaaaccaaaactgccacgcatcaatgatggaattgtatctccaaattcaaagacacattcggcggatgtgattctattcacgtcatttaagtgtacgtgatctggagcaagaaatgcaagtctagaagagacatcaaattccccataacatcttgaatacttattgctagttgtaatttctaactgatcctctaaataatatgtttgtttttctccttctggtgttgaggtatagaaagtgtatgcggttaaagtatcatagacatcattttgttgcttatcatcgttgtatagagaaacattggaaaggattacatttaaggaaaatccagatattggtttctcagtgtctaatataaatttacattctaattcagtcatctgaaaagatcccacatccaaaatatctcttgaatgtttccttaataatggtttatacttgttgggtataaatcctttcaatttagcttcttctttcaccctatccaattcagcaaaaaattgatcttgtttatgcttgaagtccattaaaaattcttgtgttttcgttagtgtatctaacttttgtcttttatatgactgactcacaatattatctatgtttttaatagcttctgattctgaggatgttgaatttcttgaatttggaatggcataatatcgaccagtttcttcatcgtaataaaatccgggtatttctctaggtggcatactgttgcctaattgtctatatgcaaactaaagtaaacttattaaatcaaaaagaaatccacaatgaaactccatagagaaattcatgcaactgtaaatgattcgcataagaataattttatcatggcactctgctagcactagcctggttttcagacctctttgacgatacattttctttctgaaggtttaacatcaatatatacattgaggataactgattattaactaaaagttcataggatgggagtgtatgataaacttcaagctccagaaatagaaaatgtgcctgactgaaataaacacagaagaaacggatactacgccaaatttagaagtacatcatcaatttcatattcctgaaaatatcattaatatagggcatcaaattgcgcaggagatatactatgacgatgataatgaagaagagattcaacattttgaatataagagtgaattagaaaagaagttctctgtaggatctatagtgggattaggattttcgttgatgaatgttccctttggagtagcttcaacattatccattggattggtttgtggatctaatgtgacaattttctttggatggatattgtttggctttttttccataatgatatctttatcattgagtgaaattgcatcaaagttcccaacatcgggtggtgtgtatcatttttcatgtattctagcaaacgaaaagtacagtttaatcacttcatggtttgatggttggtacttgataattgggaatttattgatgtttgtctcatattcatttggaggtgctcaatttattttatccactttaggtttgattgaatcagattataaagaaaatagtatacttataatgattgtattcatattgatcatcttgatctccaccgtcataaacataaaacttcagcatattttggatagagttaatgagatttgtatttattggactttctacacagtattaattgcagatgtattgattttactattctcatctgactttcacagcttcaagtatatctttacacattttgatgcatcaagatctggttggccaggctttgttgcatttataataggtggtatacagttttcttcaatgacatttaatggttatggggcaattgtttcaatgagtgaagaagtgaattttccagaaaagactatacccaaaggtttgatctactcaatatgtgcaagtactattacaggtttaatatttatttttccattgttgagtgtattgccggaactcaataggttattagatgataatcctgacatttttccaattgatattcttctgaaattatctacaaaatcatttattgtctcatttttcatatcactgatgattattggtgctattttctttgcaactattggttcacttacaactgtttccagaactatattttcttttgggagagatcgtgggctaccatataattcagttttacaacaagttgataccacagctgatgcaaatcatgttcctaaaaatgcaattctattagcatctggattttctataatcttgggttcattttcacttatatctactagtgcttttaatgcatttttaggttgttctgttatggctatgaatattgccaatggtatacctatcctatgctccctcataaataaaagaaaaaaaataagaggagcaccatttaaattgaggaaatttggttatattcatcaatatagcaagttgctttatgattgctttgacgtgtgtgattttatgtttcccaccatctcttgatatcgatatccaatcaatgaattactcaattgttgcatttataatatttacaatatcaatatggttaggttatcacttttggggacgggataattttgttgggcctctcttaactgcatcgcattcaaattcagctactgtggagttggatgttgttccagttagtaaaggtgatagcagtttggttagtaacgataactgtttgaaggactccatccaatcaaataaaatgaattcctttgctgtcccaaataggaaagaaagagatggttttcaataagccatacaaattttgatagttttctaatgagcctcccatacaaagtgcatttcatatggcgtagaatatttacacgtcttcaagctttgtaactttttaaccgtcattacttacttttcaacaatatagattctctagggtatcaatctaatattacctgtacaaatgtgaagatactcctctaacgttgtaatacatgaaaatattgacttgtatatatcatatgcttcctctattagaggtgttgataataattggggagatctgagcatcattatgcacaagaagtgaaatttcagaatttttattttttcatgtttttttattgttcaggttaactactactagtttatttttatttaaatcttctgtcgttaagtagttcagcaaaaccattcttgtaaatatatacatcaaactaaatatgatgcttcagagaggtatacgagtttgcttcactataaataaaagcttgaacgtatatggtactgtaagtcgaagttttagcataacttcttcagtgtctgcattcaagagaccatccagattcaaaccgattaaagaagaactaaaaattgaggaaaaagaagaaactaaacaagaaatcaaacagaaaacgcaaaattcttcaagtagatcatcaccaaagttagttaaatcaaatcaatcagataaatcttccatctcagaactcattgatcaaaaggttaatgcaaagttaaatgaggaaaaaaagcaaaaaaactctaaagttccaaaacctgtcaacaacttcaaacaataaagaagcaaaaaaggatgcatcaaaattacctaaagatgaaaagaagaacatcgattccaagtataacaaatcaaaaaatgaatctaaaaataaaaagtcattaagcaatgataaatttgataataaaaaagaatcatcagaatcctcaatgaaggttatgaaagttaagaaaagaaaagcaccagtcaaggcagatggatccaaatataaacttgatattcccacatttttatctgttgctaactttgcaacaattttaaaggttagagttcctgaattacttgaaaagttagaggaacttggatttgaaaatataacaaatgaacatattttagatgttgaaactgcagaattaattgcacaagaatatggcttcgaagttaatcgtgatgataatttaggtgcagatcttttccctgcgactttatcatctgatcctaagaaattagttccacgctcacctgttgttacaattatgggacatgttgatcatggtaagacaactattttagattacttgagaaattcatcaattgtcaaaggtgaatttggtggtattactcaacatattggtgcattcgttgtgaaaactcctgtaagtaagaaagaaattacattcttagacacaccagggcatgctgcatttttaaagatgcgtgaaagaggtgcaaatattacagatattattattttagttgttgctgctgaagatagtgttaaaccacaaaccattgaagctattaaacatgctaaagcagctggtgtaccaattatcattgcaatcaataaatgtgataaggaacaagcaaatcctgataaggttgttgctgatttatcaatgcaaggaattgatgttgaagattatggtggagacactcctgttgttagagtttctggtaaaacaggtttgggtatgaaagaacttgaagaaaccattgttactgttgctgagcttttggatttaaagactgaagaaaatggtgttgttgaaggttgggttttagaatcacaagtcaaaaaaggtttaggaaacgttgccacctttctagtgaagaagggaaaactcaaagctggtaccattattgtttcaggtactacattctgtaaagttagagttatgaaagatgaacacggtaaagttgtcaaaatggctaaaccttctcatcctgttgaaatttctggttggaaagaagttcctgaagctggtgaatatggtattcaagcaaaggatgaaagttttgctaaaaaggttatcgtaaatagagaaaaaagacaaagaatgatggaagaagcctctcaaattgaagagatgaatcaaaatagaatcaaggctattcaagattctaaaaagaatgaacagatacaggcttaccaaatgcaaggattaacacttgaagaaattaaagaacttgaaccagaactatttgatgaagaaagtaataaagttgaaatggtgaattttattattaaagccgatgttagtggttccgctgaagctgttaaacaaagtattgaaggtttaggtaatgatgaggttaaatcacatgttatttttgaagatgtcggtgcacctactgaatccgatattgctagagcaagagatgcaaatgcgcatgttttagcctttaacgtcaaagttccaaaagaaattatgaatactgcatccaaatccaaaattacgattaaggaatataatgtcatatatcatttgattgaagatgttcttaaaatcttaacttccaaacttcctccaatttacgaaaccaaggttatagccaaagtttcaattaagcaattatttgaaatttctctcaaaggtaaagaaaaaatggttattgctggttcaagagttacggaaggtactttcaaaagaaatcatgaagttagattgataagagatggtgacactatctatacaggtaaagtcaagcaactaaagattgtaaagaatgatgttaatgaagtattaaatggtggtgattgtggtatatcattagaaggtgatccagaacttaaagaaggggatattatcgagtcgatagagaaaattcctatagaaagacatttgtaaataaatttaatagattcaacatgtatattaaatgtttagaattctgtacatataatgaggcatataaatataataatataaatggaacaggttaatctttttccgaattataacgactattgtctacaatctccttataatttagaaagatttttctaagtaaactatgatctcccaaaaactcaacttttttgtccatttcatgctctaaatgttttataaacactcgttctagaatcatgaaaatggatactaaataaaagccttattaaatatgagttatatttattatcactattttcataatcaaatatcaagtattctagtgttgatttcttcaaagacaaaagaaaaagtatcaatttctctatcttcattctatcaatcaaacaatcattaatatcattaagtgttttcttaacatatgctagatcttcttcaccccatggaacctctttatgtaccatactatgcatcacgtgtaaatcatgaacacttgaagaatcagacccaacatcattatctgaatagtgtatgtttgggttacctgaactggtaacattatgattgttacctctataaggctcaattgaagattctttgttatctgttctacgcttggtatgtttatttttgcgagtgtgtctatgaacatgattgtaggataaccgtattttatgaatggcattcaattcattttgtactttattgtttaattttctgattaaatgatttgaattatgatctttatctccaaaattggataaaacatgaacagcttcctcaatcccatcattgttatccaagggtatatcgtgagagctatgtggtttctgtgcttctccactaaactgtactacattttcatcatctgtttcatctcttccttcttcatcgcttgaaatgtctaataaagcgtcatcgatttgttctgccattcttatccatatccttcgacgagcaaaatttccaaacttaccaactccagtccagtgataacttccaaatctaagtttcgaataaatccaaccttcctcatcgacatcattaatcatcataacatgccattgattccaagaccatttccaattataagatggttcagggtacattgacaaatcagacaaattctctccctttagtgtttgatattttggtggatccaaaggatataaaactgactctttactataatacttcgacccaaatacagttgcacctctttgattttccacaatgatttcataacttatggatggtgaagttgcattcaatttagatttaaactttgacaattttttcaaggtttcgtagtctgttgtaaactgagataaacatttcaaaaaatcgtctcttttattgaactgaggtaaccttgtaatatgatcgtccatattatcataatgggttatacatttttcaatcaatgatttcctatctattgacaaaccagaaatatgtgaaatctgagaagttaactcttcttgtgacaattgattattacttccattattattatcattatcatcatctgaatatacatctatcgatccttcctccaaactactgtcgacttcggagttatatccgttgagatcgtctgagatttgatccacattacctgtattcaattgcgtcggtacctttaatagtcctgatctttttgagctgaataccggtgtggcatcggtcattaatctttgttatttctattgtgtatcttcaaagttaattctaaagaacttaatccctgcttcttggaacttcccccatgggccttgtagaaagatttccccttttcatgtaaaaaaccaaatcaaagaaaagcactttgcagagttcgaacgtacacactgaaaaaaaactcgcgaatgtaaatcccatcattaatgcattttttcaaagtttttcactgttgatgttgtttcattaaactgaaatttttgtctctgtaatggtgtctcaaatctaagctaaactcatcgtagagttaggttattttgtgtattatcctttaatataatcaaataccagtaattaatcatggctgcttctgaaattgttgatcttgtttcatcgagtccttcagaagatttggaaaaatccgattatctcagttacgaagatcaaacagagaatgttaaaaagcagtttgtattattgaaggaaaatcaatatattccaagattgaaaaatgtatactctgcaagtaatgaatttatgacatgtgattgtgatgaagagtatgaagatgggcacaatatggcatgtggtgaagattctgattgtattaatagattaactaatattgaatgtgtaaatgatcaatgtaattgtggaaataattgttcaaatcaaagatttcaaagaagagaatatgctgatttttctatatttttaacaaaaaataaaggatacggtgttagagccaatgttgatatacctgcttatacattcattattgaatatatgggagatattattgatgcagctgaatataaaattagaaaagaagcatatgacaaagaaaatattaaacatttttattttatgcaaattcaagataacgaaattattgatgcaactaagagagctagtctggctagatattgtaatcattcatgtgatccaaatgcttacattgaaaaatgggttgtcaactagaagatttagaatgggtatatttgccaaaagaaaaattttaaaaggtgaagaaatatgttttgattataatgttgatagatacggtgctgaacctcaaaaatgttattgtggtgctgcaaattgtttaggtattatgggtggtaaaactcaaagtgaaactgtaagacttttacctcatataataacagaagctttaggtgttaaggctgcagatgagaaaaaatgggttaaagaacaaaagaaaaatggtgttaaggtcactacagataatattgattcaaatgttaatgttgaatttgttaaagcattagaattacaacctgcatccgttcctgaagttgccaaaatttcaagttgtttgatgcaacctgatttagatataattgttattgattcaattttgaaaagattattactctgtgatgatgatgaactggctgaaattttagctcgttttaatagatttcatggaattcaagctttaggtaatactttgaaaactattattaatagttcctctaatagaaaaaaactaaatagtgaagaaaaagatatattattaggtattgtctatatacttcaatgctggccaactttaaaatctaaaaatgcaattaatgatagtgaaatagagaaaagtttggaaattttaaccaagaaaggcataacggagaaattaaacaatgatattacaaaattgataagcggctggtctgaccttcaagttgtttatcgtatacctaaaaaacaagaaccaactcaatctcatattattttagatgatagaagaagtcgatcgaatgatagacaagcttctcctagttgttaaaattcctaaaggtcctgcttctgcaacaaagcaaccttgggggaatctagatatctcatctttaccagataatagaaaaatagatgaaattccattaccatttggttgggaatgggcaattgatgaatcctccaagaatagatattattataatagagctttgaataaaacacaatggattaaacctgaatggaaaccgattcctgatgaaagtgaggaggttcgtagacgaaaagaaagggaaagagaaagagagagggaaagagaagagaaagagaaagagaaaggtatagagaattgtgtgaacgtgaattgattgaaaagaaaagagcaatgtttagaagatctgaaatgagacaacaacaggagaaattaagtatgatatctagtattattgcagaagcatctaattctgataataatgtagatgatgtaaaacaaaagaaaaaatcagctttaaagtcttcttcaaagtcaactcatgatcgtaaagatgtgaaacaagaacatacaaaaactgcaaagattgtttcacctaaagatttagaagcaaaatggacgaaactttttgcatcatatgttccaaatgctttgagaaaatatgaaactgatataggtagagaaaatttaaaaaattgtgcaagggatattgttcatttattagctgataaagaaactaaaagacatagtggtgaaagtgttcctgttacgatatctgaggagcgtaaatctaaaattaagaagttttgtcaaagctatatggcaagatttttagaaaagttggatgaaaagaagaaaagaaaattaaatgatgaaaatggtgataattttgattctgaatccaaaaagataaagtcattgtaaaaagtttattctcaaatgacttttttttaaaacaaaataaaattgaaatgtaatatactattttattaatatttttaatgatttctatagaagtgtttacaatatattgagattttcaaaatagttataaaaaattattttcttttcaattatattttaccaaaagcttcatcgacaatagaagctaaaatatcaacatgtttcttaccgaaaactaaagctggtcttaatctaacacccagtgtcaccacaaccaccaatatttaaacctaaaactttacattccactaataattggtttctgagagcagtagttggtaaatcaaatgcaataaagaaacctctacctttacctcttaaattcaacatcttacctgaatatttagtagaaatagcttcaagtttagagtataaataatcaccagtttctttagcatttgtcaaaagatctttttctttaatttgttcaataatagtttttgcaattaaagccttcgatggatcaccacaccaagtgttgaattgtctgaatggttgatcaccagccaagccagcttcgctgaagaagaaacctgcattttgcatctttttagagaaagtcataatatcaggaacgacatcataatgttcatgtaaccacattttacctgaaccaccaccaccagtttgaacttcatcaattatcataataacatctaatcttttagtaatttctctgataccttggaagaaagctggggatgcgtgattatcaccaccttctgattgaacaggttcaacaataacagctgcaactttacttggataatttttaatagtttcttctaaagcttttaaacatctttcttcttcagctttattttcagcttcaaattgatctaaaggatatttaagagctgggaatggggcctttggccaatcgaatgctggaatatctaatttatgaattgcctttgatctagttgttgataaagaaccaaataatctaccatggaaagctttttcaaatgataaaataaccatatcagatgtacctggtaattgattttccataacagaagttaattcttcttcagtaaatggtttattacctcttttcttatttgcttgaaacattaaagcagccttgaatgccatttcatttgcatcagaaccggtatgtgcagtacaaactttatctaaaccttttggagcaacagataataaacctttctttaagatatcataataatcagttgatgggaaacatgctaatgcaggtctgttacataaagcaacagccatttcatcagaatgtgcagttttcaataattccggattattgtaacctaaagcaattgaagagatttgacaataagaatctaagagtttgtttccatcagcatcacagatatagttaccaatagaattgtaataatcggtaacgaaataagcagcctttgtatcataaacagtagataattcttcaagttttgccttagatacaggacctgggattgcagttttgatttccggagctgaaggttcggttgggaaataagtttcggagatagacattgaatttaatagattcctttgacaaaagaagaagagaaaagttcaataaaatcaaatcaaatcaaatcaaattaaattaaatttacaatttccatttcagcagaatctgatcaccttttatacacctaaatcaactgctaggtgaacaatcaattaatgaacgataagtaaaatagttgaaataataatagccaaatattcattatcttgacgggaaacgaaacccgtttgacatattttctaattttctgattttctgatagtgatatagtgagtgattcgatagcggcggcaatttttcacttttggatttcactttctgtatatgggttatgcgactattgtaattagagagaagggttgaatgattcaagaattactcaaccactactacggagtgtatctttattctagctgttctttttaataagctgtaactcagctataaaacgtgtaacctctcagaatatgttaggaagagcctttataaactattgattacgtaatttatcaaaagaatcgctctttgaattcaattaaccaacatgaagtttatcggtatttcatgaataaggaggttgccattcgaattcgttataatttagttacatatatcatcattaacatatcagagtagataaaatggatcagtcgtttttaagtgcaaataatgttgaactagatagtaatgcaacagtgctattaatgggtcttagaagatctggtaaatcttcaatctgtaaagtggtctttcataacacacaaccattagatactttatatttagagagtacaacaaaaccaacaacagaaaattttaaatcacttattgatttagctgttattgaattacctggtcaattgaatttatttgaacctgcactatacgattatgaaaaattgtttgcatcaattggtgcattagtttatgttattgattcacaggatgaatatttaagtgcattacaaaatttagctgtcattataaaatatgctgtaagtgttaatccaaaaattcatgttgaagttttgattcataaaattgatggtttatcagaagattttagattagatactcaaagagatataatgcaaagaattggtgatgatttattagattatggactagaaggtgttcaaattagtttttatttaacatctatttttgatcattccatttatgaagctttctcaagaattgttcaaaaattaatatatgaattaccagcattggaaaacttactagatttattaatgcagtatagtaattttgataaagtattcttattcgatataaactctaaaatatatgttgctacagattcttccccagtggatattcaaaattatgaagtttgtgcagaatttattgatgtgtcaatcgatttagatggattatatgaatctccaaataatcgaaatagtttacaacaacagcaacaacaacaaatgaagagaaattcaattgctggatctttatatgatgatataggtaatgcaaaacaatatcaaaatagtgtatcaggtgaagaagttgatgtactaacaaattcaaaacctacaaaatgtatttcaaaacttgaaaacggtacagttttatatttacatcaaatgataagaggattagcattggttgcagttagtcgatttgatgatacagatgaagcaacatcaatttcagttattgatcataatgttgctatatttaagaaaagtttagaaaaaatgtgggaacatgctaagtataaataatttaatcaagttttttatgtatttaagtaaatagattattaataaattattattgtttatcaatcatgttagctaaatcaatctcttggtagactcttagtaagtaaaaaactacataattttttaaaaaaataaacggtttaaccgacaactgcaggattcgaacctgcgcgggcaaagcccaaaagatttctaatctttctccttaaccactcggacaaattgccttttacaaagtgtttttttgttatttttttcttgttgtctgtttcagattttttaaattttttaggaagcattgttttctgtttgatcaactgtatttaagctacaaaaagccttatcatgtagtttagtgggaaaaaatatgcaaaacttaggtactgcttttgtaatatagaatttgaccggaaaaaaagtttaatctgaaaatataataatttaatcatttttattctttcaacagcatcctaaaaaaaaattattcgtttgggattaccaccacgagatttataaaatatacatatttttactcaaaaataaaaagtctggttcttattatatctaaatttttaaaaaaaagatatattgaattgatgaatcataaataatatatgagtatatgtaattaaactataaattttgcaattataattgtcaaaaaaatattagatgatggtaaagaagttaaaattttagaaaaatgttttggaaaagaagttcagttttgtattaaactgaattttaaatgatggccaaaaagtaaaattgcaataaagtttatcaatgcattaaagaaacaaaacaaatttgtcaaaaagcaaaataaaccaaacaaggacgtacatttattctataaactagtcataaaatatatataaattaatgtgtaggtatatagataatacaactaatcatactttcactcaagcaaaataatgaccatttcattattacaaaaacaggcctacaaatttctttctgaaaaagatgaaataagttttttactcaacttaacttttaactatcaagaatcctaatatagccaagacatgcccttaaaatagtgattttaaaaaagtaaaagaagactgagtagtaaaaatatttatggtactttagtttgaggtttgttcacatggtttttttcttacattctgcctttttaaagtttccttactttttaacggtttattcaaacacttagataaaacaagtttatttaaacacttaatttaaaaaaaccaaaacatagttataatgtataaattttgaagatcttagtttgaaaaaaaatgagttactaaactaaaacatatatcgtgtgatggtcactgtaaaaacttgttgctttacctatatagtagagcaaacaactatctaattgaaattagttttataatataaacttttaagaaattaaattatttaaattttatattaaaataaatttccagtttttttatgagagcaaacaatgatatctttttcaatggaacatacttagagaacaaaagcaatcaagtaaagaattaagaacattgtattcaaaaatattgaagtatcagcagacaattttttctttcatttgctttcaaaatcagtatcttgcataaacaaaactgtaaaatgtaacaattttgaaagagcaaaaaaataaagaaaagtctaaaacttacaactaaaaaaagtttgaagtatctttttaatacaaaatcaattactttaaagtattattaaactttattgtgttgttatcgattgctgtatttaagaaaacaatttttttctaatttgaaaagccaaacttatactaactttcaaatgtaatgttacactgcactaaattcattagttaattcaaaagtttaaaatcatgaatgctttaaactattataaaattttgggctgaagttaaacaaatttttttggcattgttccagaccaaatgattcttatcttatctaaagtttattaaaaattgggagttgtataagcacttcaagtaaaagtgaataagaggtgttttaaacttttcgatacaataagattctgtatagttttgagagatacacagatagttgacaaagaaatctgtgtcaatcccaataataattgaaaaaaaaccttattgtcagtaaggcgtatagtaagtaagacatatgcactgctacgtcagaaaccttaaaatctgtctatatgcactacgtactgaagtttaacggcccaaattctatacatatagggttttctgaaacaaaatctgaaattagcgcgctatgacggaaccccgagatacgatcgatgcgcccataaaaactaattgtagtaattgggccctgttatgatacataattgttatgtatatactcataatattattaaatattcctttctatgtttttttaagaaaggcatattgacatgcagaatgttaatttattcttgtttatagcaaatgtatgtataatacataaatgtatacataggaattataaaaaataaaaaaggtgtaagaaattcaactgaaagtgaagacccagccaagaatttctcttaaaatatttagggcatcgtacataatttcaatttctcggtttttaacttttctttatcgtgtgtattgtcaatttgttcaatgcatctcgattttctcaagaaatattttattgcgtcactaaaaagtttagatctactttttggtaattcagctttctcttttggctttatcgtgctaggtatctataatttagcttgtattcaattaaaaagtttattttcaatttttataaatttattactaaaaaagtttatttttcatatatctatgttacaaaacacaaattcgtttatgttttgcaattctagctagttatgaatgttgttttaccgtgtaattttgatagcaatttaactttcaataatttaattataccaatgttgcttttatttttcgaatacaaacaaccaaataaaatgaaaaaccatctttttttattatataaaaactagaggcaatgatgcattttccaaaaaattacttctcttaacttatatttttttactatcacattctttgaattatctataaacaaaaaaaatctttctctatgattgtcaactcaagtttttgtttggcatttttgctgtcgttatttcaagtgacagcagccgccgatgtttatggacaatcaaccactgcaattggtacttccttggttctaaaagatacagctcaagttcaaacaggttttgcagctaaattttatgattatgatgcaataaatactgcttctctttataatgacaattgggtcgccaatgaatacgcaagtttaccagttagcgcttctgtatcaagtatcacagatccaaatttttcttttggtcctgttgtttttgcacaaagtctttatggtgtaacaagtgtcagaatgcaaaaagttttaattgaattagaaggttttttcaaacgtaagtatttaaaatttcaaaatttattttactgtctttaacattatactaactaagttttttctattatagctgacgagtctggtgtttatacggttactttagactctgttacactaggtgcttttttatggattggcgatggagcttttgatgtttgctcaaagacaataccaaatgacgcatatcaaaatgttttattaggtctcacagatacaacttctcattcttcttatgtttatcttgaaagcggtacttattacccaataagaattatatactataatataggttttgttggtccaagtatgaatcttcaaattgtcagcccttcaggtcttgtttacaacaccttcaacaatgttgttaactttgatacttccaatattaatgaatgtgcaagttctcaaggtactgaaactctttctgtttctctctcaactgattcttcaaatgctccttcttcaacagcttcttcccctccttcagattttcatatttccggtgcttacagtgcaacaggctgcgctcttcaaacaaatgatgtgtctttaacagctggttttcaagcaacattttacaattatttattgttaaacgatctttttgattatcaatatattgctaatggttatactgtagctccaattattggcagggcaaatagaatcacaaatccaaactactcacttggtttaattggatcaattttattatctggaatttacaatcaagtcacggtggctgcaggtctaggttacgtcaatgaattgactggttatttttatgcaaaagaaagtggtacttacactttcaatcttaacaatgttaatgacgcagcaatggtttggtttggtaataatgatgctttcacttgttgtcaacctggtgtcattccgggtggttctgtaagtggtgcattattgtatagttacggacatagagtttcagttaatgttgatcttgaggctggtaattactatccaatgagagttgttttgcttaatgttgttggaacatctgaattagattttagtgttatcaccccagcaggaactgttttacatgacgattggacatcatgggttttctcaatagcaaatactcaaaataatgtttgtgatagttctgacgatgctagtagcagcattacgtcagacacccctagtacaaccccaggcgctgcatcatctaacacatctggtaatgattcatctagcacatcagcattatctaacacatctggtaatgattcaacttctacatcaggtactgcatcatctaacacatcaggtaatgattcatctagcacatcagcattatctaacacatctggtagcgattcaactgctacatccggtactgcatcatctagcacatctggtacagactccactactacatccggtactgcatcatctaacacatctggtacagactccactactacatccggtactgcatcatctaacacatctggtacagactccactactacatccggtactgcatcatctaacacatctggtagcgattcaactgctacatctggtactgcatcatctaacacatcaggtaatgattcaactgctacatctggtactgcatcatctaacacatctggtagcgattcaactgctacatctggtactgcatcatctaacacatcaggtaatgattcaactgctacatctggtactgcatcatctaacacatctggtacagactccactactacatccggtactgcatcatctaacacatctggtacagactccactactacatccggtactgcatcatctagcacatctggtaatgattcaacttctacatcaggtactgcatcatctaacacatctggtacagactccactactacatccgttactgcatcatctagcacatctggtacagactccactactacatctggcaccacatcatctaagacatcagcatcatctaacacctcaggtagtgattcatctaacacatcagcatcgtctatcacatctggtagcgattcaactgctacatctggtagtgattcaactgctacatccggtactgcatcatctaacacatctggtagcgattcaactgctacatctggcaccacatcatctaagacatcagcatcatctaacacctcaggtagtgattcatctaacacatcagcatcgtctaacacatctggtagcgattcaactgctacatctggcaccgcatcatctaacacatcagcattatctaacacatctggtaatgattcaaccaacacctcaggtagtgattcatctaacacatctggtaatgattcaacttctacatcaggtaatgattcatctaacaaatccgcattatctaacacatctggtaatgattcaacttctacatctggtactgcatcacccagcacttcaagttcaggttctatcagaccatccggtgccggtactggttcaaacgccacatccggtccagattcctcaagttcaaatggtttaggttcaggttcaggttcaggttcaggttcaggttcaggttcaggttcaggttcaggttcaggttcaggttcaggttcaggttcaggttcaggttcaggttcaggttcaggttcaggttcaggttcaggttcaggttcaggttcaggttcaggttcaggttcaggatcaggatcaggatcaggatcaggatcaggatcaggatcaggatcaggatcaggatcaggttcagatgcctccaattcaggatcaggttcaggctcaaatggttcaggttcaaatggttcagtttcaaatggatcaggttcaggttcaggttcaggttctgatgtctctaatggttctggtttggaccaatttggtcaaaccacacaatattgggcagggtcagtcactactacatcactatatcctactaaaacaaaaaattctgctaacactcccgtttcgagtaccattgaaattgttttaattccatcatcatcaacatctgaatccaataatcaatcatccatttccgttgaattcaacgcagctgtttcaaatacagcaccacaccaatatgttcttggtttaactttattattattggccctataatccaaaaagaaaaaaaaatctttcgtttgataccaaatttttcttcccattaatttcaatgaggatagtgtatattatattaattgttcttttataatatgatttattttaattagtttacttttataatttaaaatgcaaatttttgcattaatatcaataatagcttacgtttttcataactttgttttcttgattgtcacgattgacttctgagataattatagtacaccgtatacgtgcacatgagatagaggaatgtgagaagatcacaagattttagattctcataataatcgtatttaaaatttttcgtgacttttttttactgtgtggaaaacgaatatctccaccattacttttaattacacatgctttaaattgttagttcattacaatatcataattatgatattgcttaattaagattgtattcttcaaaaaataattaacaaacatgacttaaactgaaaagtttaccaagatgtgtagtaacaaaaaaaattgtgagctaagaggttcgaactcttgcatccgaagatattgcgacctgaacgcaacgccttagaccactcggccaaactcacaaaactaggaaattaaagaggttcaaaaaacagagcagaatatattaatgcacgtgatctgcagtagctaataaaagaattgttaattactcatgtgaatacagcagtatttgtttgataattaatttttgcacataataatcctttttaaagtattttgattttaaaaatatccaataagtcaagttttttttaaaaaaaaattgttcatgtttaaatagtcaaaatagtttttaaaaacaataaaactttttgggaactcttattttttagtaaataaaagaggaaagtttggctttgcttgacattgaaagatcatctagggtttaaaataaagattgaatatagttgtttaaacaattcaagattaatacaaaataaacaagataatgaaagattggttttacagatttgtagatacttacttgacaatagttatcatattttcaatggtttaattaagtagtttaactgatacagatatattgtaactattacctatactcgatatactatatgtctgatattatatgttacttcaacacattttccaaaagaaagttaaagaagaagttagaaaaaaatattttttcatgtcaatgaaatcagtgaacaaactgagaataattaatcattcctgtgtctatattaccttcctctttatattttttgcaaaaatgatatatagctaaatcgttgagtaaatataagagctacacttaatacacaagatggattctgatgatgatataccgtaagtaatgaagagaagttctttttttggagataaatgaatatataagggatttgaatactaacatattaatatttatttcagaatgttatcagctgcaacattagcagcattacaagaatttaagagtgaagagaaagaaagaaatgagaaatttgcaagtttatatcaaaatgcagaggaagcatttgagaaacgtagtaaattaagtattgatgattttaaggaagattggcaattatcacaattttggtatagtgatgaaactgctagtatattgcttgatgcattattagaaggtgcaactgaagatacagttatttgtattgcaagtgcaccatcagtttatgcaattattaataaacgtgatagaagtaaattaccaacaaagaaaatttatttatttgaatatgataaaagatttgaattattatcaggtgaagaatattttggattttatgatttcaatgaacctgaaaaattccgcaatgatttaactggtaaagttgatagattacttattgatccaccattccttgagagtgaatgtcaaaagaaatcatctgaaactgctaaacttttattgaaaaaaaattcatctgctagaattattacatgtacaggtgaaagaatgaaggataatgttttaaagaattatgctgaggaaggtgttaaagttacagatttttatcctgaacataagaatggtcttagtaatgaattcagatgttatgcaaattttgactgtaaacaatggaaaaaaatcgattaaataggtattataaataaatatttatttaacagttacttgtatagaacattcaatgtaagtaagcatgtataactaaaataaactaaccaacatcaatatcaatcttaatgcaactgaactggcataaatacagctacttaacaattacgtagttggtgcggaacgaagtgaaataaatttatttgcactgcatgagcttttcacgttgaaaggttttacattatttatttatctttaattcaacttgttttaataacatttagtattacctgctaaacaactggtaatatatcattacagataaaattttatttgtcttattattttgtacggatataaattttttcattttaaaggaaatagaggttgactgttatattattataattacaagagatttatcaattatttaaagatttttagaaaaaaatgcacataatatttatacgacatggtagtcgaatagataaaagtaatccaggtatatcaccttcacattcaagtatttcttttgatttagagaaaaaatctgttaaagttgatattgagaatgaacttgagctagaaagttctaattggttatcaaattttgatccaccattaaatgaaacattagcatcatatgaaatggataatgcatttatgaaaattcaaaataatatatttaatggtaggaaacataaaacttcaagaataatgattcattcatcaccttataatagatgtattcaaacaagtgaattattattagataaaatacaaaaatttaaattaaaggagaaagagaaaattgatattaaattaagagttgatcaagcattaagtgagtggttaaatgaaaattataatttaaaatatttaccaccaaatgatgatggttattcaatgataaataatgttaatgcatatttaaatcaagatataaatgattctaattgtaaaggagaatttagtagtaaaactagaagtcaattaaaagatgttaaagattttacatggtcatataatcaacttggacattgtggagaatatggtgaatcagcatcagcatttactagaagatgttttaattatttaatttatttattacaattttattatatgagacaaaattctgaagctgataaaaatatgattgttttcgttgtttcacatggtgcaattatttctacattattacaaattttattaggtagatcagttttcaatgaaattccattatgttcaccaatttattttaaacaatccgagaagagaagatcagtttttaaattaatggattatgattttaatttaaatcaattattatcaccatcatcagatactgaattttataaaatattagatacaccaattgatttaactaaattagattcaaataatttaagaagtgaattaactattggaactagtggttatacaactataattcaaagtttaccaaggacattagaaagtcctaagaataataaaacacgtaaaagaagaaatactattaatattggagataaggaaaaggatgagaataaaggagaaggattagaatcattaaaatatactagatcatcaaaacaattatatttactgaataaagatacaagtgaagagaaagtaattgatttaaataaattacatagttattttggaagtggatcagaaagtgaagatggtgatgaagatgaagaagaatatggaggtttaaatataaatttaggtagaaggtatagtagtggtggtattactactaatgataagaataataataagaataataaaaataaatacacattaaaggatgataaagaaaaagactattatgaggataataatgacaatgataataataatgataataataataataataataataatgtgttagtaagtataaatgattttgatgataagggtaaaagtttaagtgaaaatgtatataagggatcgattacatcattaagttcatttaatgaagagaataagagtaaatttcaactgaatgaagagaatttttatagtaagacatcaccaattattggagatccatattcacatttctttcttaatggtgagaaagataatgatgaaatttataaggatgaatttaatatgagtgcaactactagtcaaaatggtagtataagtaatacaattgaatttaatggagattttaaaagaaataatggaggattacatatgagtgataataggaatggtaagattggtattagtatatgggatagtgaagatgaagatggtgatggagatggtaaaagtaatgataacgatagtattgatgatagaaacgttttatcatttgatacaagggctaaagttgaaaagataatggataaggataatttagagaaagaggaaggtaatggtggtagtagtagtggaaataattctggatccaatgtaagactgatgatacctaagttgatatcaacgcggaatatggacttacttgtaaggggtaatgacactaatagtaagagtcatgaaagtgttggaggatatggtaattcacgagagaatgaattgaatgcattaaagagattactggaggatagtaagatgatgagttcagatgatgagagtgaagactagtgaagaagatggatggtttggaggattttcctaataaaatagagtaaaatagagtaaagcaaagtaaagcaaaatactttaaagcaaagcaaatcaaatcaaatcaaatagagttcgtctatataatagaaatagagttcgtctataatagaaagtgaaaataaagtgaacaaagaatttaaaattttaattattatatagagcgcatttcatcactttttttcttttttcttcttttttcttttttgcttcttttgcttttttcttatgttattattattatttatactattaactttattattaatcaatccacctgatcaatggctagcttctttaagaaaatcaatccgaaacttaatagatcagcctctaataatcaagtcatcaataataataataatcataatcaaaatcaaaatgattcaattattgatcagggggatcatcattcttcatcccttcaaaattctccagctcagttaggtaataaatctccttcaattccacctccattaattgccttaccttctcctcctataagtcaactaagagatagattatcacctaaaattaatcaaaatcaatcatcacctcaatattcttatgataataaccccactccttcaattcctttcaaatcccgttataacgtccgtcagtaacgaaaataacgccaattgagaaaaacgttaaaaaatttaatgagcatcaaaataataaaccttataataatattcaaaatattcaaaatattcaaaatattaatagtatacccaattctgatagtaataatataatattaaactgatactccatttgctcaatatcaatcaactccttggaaaaaaattaaattatataattctccattcccaagatttggtcatactgtttcatcatttacttcaaattcaggtgatatttatctaatgggtggattatctggtaataatgtttatggtgatatctggatattagaaccatcaacaaataataataatttaaataattcaaattcttatatttcttcaccaattgaaaatattcaaaaaattccttctccaagaactggtcattgttccgttttaattggtaactgcttttataatatttggtggtgatacagcaattaatgatgaaaatcaatctttagataataaattatattttttcaatataacttcacttaaatggacaattacttcatctattggaattaaaccttgtggtagatatggttcccaaatttctgtactaaattttgaaatatctccaaataattggtcaagtcaattataccttttcggtggtcaattaaataatcaatattttaatgatttatggaaatttgatttatctaaatttagagatcaaaaaaatcaatggattaaattaattccaaatggtgatatacctcctcctttaacaaatcattcaatgattgcttataaaaataatttatatattttcggtggtcaaaatgatttaataattaatgataaattatattgttataattcaattgaaaattcttggtcaatttgtaaattaaatggtccaaatttaccacctgctttatcaaatcattcagcaactattttcggttctttactcttcatttatggtggtaaattagcaaatgattcaaattcaaatgatttatttattatagatttatcaaattttagttgttggaaattaaaatcaaatttaccttttaatccaggtccaaggtatggtcattcaattactgttgatataaataaggaaaaattattaattatgggtggtgatatttatgataatgattttaatggtgtaaatgatacttcatcaattgaaaatattgatgaatctaatttcaatttattaagttctgttatttatgaatgtgatatttctaaaattgatatatttattgataaaccattaattaaaaattctcatgcagaatcaaatttaaattcaatttttaatggtaataatgataatttaaataataaagaaaaaataattaatgattataatgaagctagatcaagatctaatattgatttaaatgaatctatagattatgatgataaatttacatcctcaactccacttcaaatatcagatgatgaattagagattaatgattcaatacatacagaggttgaagaaggaaaagatattaaacaagaaattgaagaaaatacaattaatgataatgacaaacaacaaacaaaggatgatgaaagtttgaattctaattctaattccaaaattgaggatatagatgacacagttaatataacaaccaacagtattagatctaatggtttagatgataatttacatgaacaattagatagagtttcatcaagtattattaaaggtaaaaatttttctaatcttacacctaaattgattaatcaaaataaattaaatgaacatacaaataaagaaactacacctgattcatttaaaactccaaatttaaatgaatctaatgatattaataccgaagattatttagttccatcattatcaactccattaatcaaagaaacttcaacaataccattttctccagctcttattgaaaaggataatatcaaattacaaaaattagttcaaatgattaatgatattaaatcagagatgaaaataagtatatcaaatgcagattcacaaattgttaaacttgaaaatgagaaaaataaattaattgaagaattaaataatgttaaattagaaaataatgaacttaaagttataaaagaagttgattatagtaaattaaatgaacctggattagcaatgaaaaatgttgaactacaaaaattcataatcaatgaattatcaagtattgaatcattaaaaaatataatgaaagaacaagatgaaaagataaataattttagtttacaaatgaaaactaaggaatcattaaatgataaaatatttgagttaactaatgaaaattctcaattaaagaataaaataaaattattagaaatgagttataatagtaaagaaacttccaataacaataacaatattaataaacttaataataaacttgacttattagttaataaatggaatactattggaccacaatctaacattaataatcttgaaattgaaaaaatcaataaagaaaatgatgagatgaagaaaaatttaaaggaatatgaagtattatttgaagagattaaaacatcattagatagatcacataaagctttattattatcacaaactgagaataataaattaaagaatcaaattaaagtaactaatgaacaattcgatgaatttagaatgaagaaaagaatttattcatcatcaagttcaagaattccatcaattagtaaagaattcaaagaaaatgaaccaattgatgataataaagactggtaataactaagaatgatgttttaaataatgataatgatgatgatttaattgttgataatagtctaattgatgatagatatgagattaaaattaaagatttagaagctaatttatttattgtatcacaggaaagggatcaaataaaggaagaattggttagtttaaagaaacaaatgtactataattccaaagtagaatagaatataatataatagaatataatagaatagaatttacagtataacactcttttaagtatgtataaaacatttagaaaataattaatttatttatttataaaccccaattaagatgacaatttattacagatctaattgttcatcatcatcgttatcccataattcatcatcatttataaaatcatttaattttttaccattattatcagtaagtggtttatcatcatcattatgattatcattgattgataattcctgtacaaaatttgatatattttcagtagtcaattcatcaactattgaactattattattattattattattactatgattatccagacttttccttttatgttgtgaataagatttacgatttgatattaaagcagtatcacttgtatttgcctttttattttctattttttcatcatcatcaattaataaatttgctttaaaatctgcaactaatgaccaaatattttgttgaaatgaatgtagaacatcatttgaagtatctgatgctaatgatttaattggttcattaattatattattatcatcatcatcatcatcattatcatcaatagtataatcttgatcatcattttgctgattttgatcatcatcatcatttgtaaattctctataaactaaattatctaacttgttgaattaaatttattggtttattaaaccaagatattctattttgattatagttattattattattatttcgacttattatttcgttttggtgatgaagttggtatataattatcaacagttaatggatcaattgttgttgaattaatattttttcgatttatttatatttatatttatattcgaattattaatattactatccttttggtaaattattttcaatatttaatttaaattgttgtaattctaataatttaatccttttcaatgaatttaatttctttaatttattattaatttctaaaatttccatttccttcattgcaagtaatcttaaattttcactatttttatcattttcaaaattaatttcatttaatttagtatttggtagggaattcccacgattacgatttggtttattattcgtgtctgtattcgtgtttgtgtttgtgttggtatttttaattggggatgttgttgatggtattagggaaatacctaaattaattcctcttcttggatgtgaagggcttgtactactagttgttcgtttgtgtcgttgttcattcattggtttgattatgaattgatatgagataagaaatgtgttgttgtgatgtagaataaaggactgtgaggtgagatcgatggcataaaatttcaatattatcatttactatttaacaattttgaaacaccactggttttttcaaatctttttcattttacaaatgtttttacgtgaatcaaaggatgttaaaatagagaagataataccaatacctaaatttgttattaaatgtaaactattttcaccatttgggaaatatttaatgaatactaaaattttcattaatgtttgtgaaaataaacgtataccattaaataataatgatttaattaatgaaaatgaaactggaaatggaaaatttaataaatttaaaatttttgaattaatttccaaaggtcaatgggagataccaattttaacatcaccaaatttacgtgaaattaatgataaaaatggcaatttatcaattttaattgattgtgtaattaatgaaaaatatatgaattggtgtttaattaataatgaaatgaaagaaattttaattcaatggtgttttgatgcaattgaattttattttaatggtataataattaatagagattcaatgaaattacctaaaagagaaaaaatgggtgatgttgaggaaattgaattagatgttgaacatttaaaagaaatcggtaaagaattagaggaattaaataaggatatatttattgaagataataagaaaattgaagttattgaacgaaaagaaggggaagtagaggaagtaaggaaagagaaagttaaggagaaaataacgataaaggatacgataagtgttataatggaaagggttaagagacaaacagttatgggacatgaatttgagataattgttaaatgtaataaaaatgatgaatatgtagttaatgtaattaatgatgaattaattattcaaaatggagaaatagagaagaaaataccattaccatttgttaatattgaaaagattaaatgttttaaaattaatgatggtaataatgaattacatatttttatatagttatattaaattgtttaaattctgatgtaattaaagtaaatgaagtattttttttaaaactttgattatttaaatcaaaattaaaatcagataatccaataattgaatgaattccattattaattggtattttacaaattttttcaattttccaattatctttaattaaaataatttcatccattgtaaataataaaatatttttattaatttccataatataatggaaattcattaatttatttaattttgaaagttcattaattattggttcataactttcgaaaataattaatttatttgattcattaatgaaaattgtaaattttttcatataattgaaaactatatttgaccattttaatggacgatcaattaattcaacacctaaatccaaactaataaatttagataatttataagataacataataggagttttaaaagggaaacaaaattttcttgatttattaaatctaatagttgtagttttcatcaaatcgattttatcaagtaatttaaattgaaatgattttgattctgattctaattctgattctaattctaattcatatttaaataaataagcagtgaaaatagttgttggagttaaattttcagttgatttagtggataataatataatatctaattcatcatcataatcaattgaatctattaaacctggtgataatgatgaaattattttaccttgggttatatcaattatatataaggtatcagaggtatagtataaatataatgtatttgataatttaaaattatttataataataccattaattggaatagatttaatattaataattttaattaatttatgattttttattttattattatcctttgaatgattaattagatgaataccatttgatgtagttattgagaatatagatttatgccattgttgaataattggggatgttccattaagtgaaaggaatggtaaatgtagtaagtttaaattagaatcatatgataatttagataaatgtgaggtagtattatcgttagattcaattgttaaaagacaatttttatcaaatgggattaatttattaataatttttgaatttattgatgttgatagagttttaccattttcataatcataaatgaataaatgattttctgataatatagtaatttttgttttaaaaattgagatatctttgattggataaattgatgaccaatttgatgaatgaaggattgaaattgaatgtgaagttaaattaaatttataaattgaaaaattgatattattataaataacaaatctaattgattttgaagataaattagtaattttaattgaaattggttggaaatgaagttgtaaatttttttcaattataatattatttaaatgaagtatgtaaagattattattagtataagcaattgaaatatattttgtagttgaatggataattgatgatgatgatgatgatgaagatgatactattggatcaaaaatatcataaattgaattaaatttaaaaattttattaattgaaattgcaaaattttgacaaattgaaacaattgaaggtggtaaaatgatttcttcaataccatttaaatagtaattgttgtttgaggtgatgataaaatcgtttttattaatgaatcctaaaagggtaatattttgatgattaattgggataaatttagtgtcgtatgagtttttagtatgaaattctaataaggaattgtaagaatcagtatatgaagtaattgatagggttggatttggattattgatgtttgtaataccattaaataatggtagttggatagtaggtgatgattctgattgtgatgatgataatgaaggtgaagtgtttatataggtaaattcatgagattgtttatcaattaataggaaacctgagaattcatttaaaattatataatgaagatcagttgaatgtaaaatagttggtataaatgaaataattaatggtaagattgtattttcatcaatatgtaagttaaaatcatctaaataagggtaggataaagaatttttcaatgatttgaagttattttctaatgataaattagttaaagttaaaggtattagacctaatttgaaggtggtaagtgataataaatgaggtagagtgtaagggggtgataataataatgattgatatttaaatttaatgtagttatccttgatattaggatttgaagattggaaataaattgttaaattgttattaggttccaagaattcaattttaacgatattataaccaggtggaggataagaggtaattaattgaggatattgaacaataattgatgaattgtataatagtgtagtgttatgatagtttaatagtggcattgtcaataggaagagaatgtagcgattaaatggttaaaattgttatactgtactatactactttatataagagaagataaataattatatggataagttaataaattttgtaatttattagttggatgggtagtggatgttgatgtagtataaggtaaagaatgttcatttgaagatacaagtatgaaaattgagaaaggaattaaccaaatttgtaatgcaaagaaggcagaaatttcatagaatgaaggataatatggaggtataaaattatcagataatctttcagttatagttggaatatagggattagagaatgaatgaaaccaagaataatgagatataagtgctaaaatggcattagtgataataattggagatgaaagtgataaatttggtaaaattgtaggattaagtgaatgaatgtatgaaatgttagcaattgaagatataaagacaggtaaataaggtaaattatcagttaatggtaatatgattgtaataattgaaatggatatggcaattttcttaataaatttagcagtataaagtaaattctcttctaccaattcagacaaataatagagagcagcagccagtgctagagtgattgatacaatacccagcagagcagcacataccgtaataaacaccaatagcataccaaaagagaagagaagagaagaagacatataagaaaccctcagtaaatggaaaaaagacaattttgctatataaagagaaggtatttcccactatgtagttattcttatactctcttcatttagtcatgttaatggactacattgatctgtgatgattgttattttattacactgatacacacctgggctcacccgcctgggttcttccgtttagtagagtctgttctattactcattgggaggtatgatgtgtctgtttagtcagtattaaactactgagatcagtaatagtcttctttatatactttaatatactgttgtgaaaatttttatctttttaaaataaaatttttatttaatcttatcttatcttatcttgtagtgtttcttttatttattttattttattttattttatcttcttctttctttctttctttctttctttcctttaccaacaatgtcctctccaacttcttctaatagaagttctcttattgatcctttggatgatttagatctagatttcaaatctttatcggttacatctctaaattctctaaattctattaacacttcgccacttttaaataataatatcgatataaatatatcattatggaataataatatcaacaactctttcaataattcattcaactctataattaataggaaacaacctttaaatcattcaaatgatcatttcttatcctcattcttaaaattatctgatgatgattatattattaataataatagttttatcaataatactacagaattaaataaaactatttcaaatgattcattacaaagatcttattcaaatcaattattaaataataattcaattattaataatcaattcttaaataagtccaatacccataatcattctaataatcattcaaatatcaatactccaattaatcaaaattacctttcctctattaaatcttcaaatactgataaatctctttacaagacagaactttgtaattctttcattacacttggttattgtccctataatgaaaaatgtcaatttgctcatggtttaaatgatttaaaatctcttaatagagatccaaaatggaaaactaaattatgtaaaaattggttaaattcaggttattgtagatatggtaaaagatgttgttataaacatggtgaaaatgatcaaggttaattatcatatactacattacattacttctttactactactattattattattattattcatttgggtgtctctcggtctttttttctttatctctgttttaattatctaatctatcttatttatcataccatattatatcatttcctatatatcttatttatattatttatttcttaatcttactataccttaatcatgtcagactatacaacaatatcaatctatacaaactctaataattataaatttcaaacttttttcaaaaatccttcatttgattcatctcctatcatatttgttgctcatcacggtgctggttcaactcatgcaacttttgataatttatcattaaaattatcacataatgcacagtctctcaactattcatcaacccctggtttcttctcctttgatatacgtggtcatggtatgactaatctacttaacgataataataatacatcaaattataacctttcaattgatcaattaattgatgattttaaatttattttatcacatttcctaaaatcattaccttataatccaattataatcctattaggtcattcattaggtggttcagttttaactaaatttctttataataatcaatcattaaataatattcacggtctcatcataattgatacagttgaagaaattgcaattaattcacttaatttaatgaataattatatattaaaattaccaaaatcttttaattctaaaattgatgcaattaattattttacttcatcaaatttaattaataataaatcaagtgctttattatcaattccttcattattgaaaaaagattcattatcaaataattataaatttattacagatttatcacttacaaaacctttttggtttaattggtttattaattcaagtgaatttttcattaaaatttcaaataaattcccaaaattattaattttagcaaataatgataattatttagataaatttttaataattggtcaaatgaatggttcttatcaattaaaaatttttaataatttaattgaatcttctaaaattggtcatttcattcatgaagatataccaaataatttatcaattactctactagattttattgaaagaaataattataaaaattttcataaattaaataaaaataatgaaattgaaaataatgaaaatgatttaattatgaaattaaataaaaaatggaatgttcaacaataataatcccctctacttactcctataatcaattaaaaatttattaattttacccctaccaactgggaacattggattaattaaaaatggtcttaaatcaaatctattatcatcaggtgaatattgttctgcatgatatgatggtgtactaacagtttgtttatgtctattaatactataataataaaaaaatgaattaactttatctgcaatttcttcaacatttttataatctttccaaatatgtgttaatttaataaacattgaatatggtccacatttatcaattttacgtaatttacccataatacttaattcattatatgtaaatcccatatcaatttcatctgattgtaaataattttcagtaattggttctaattcagctgttggtgttgcattaataaattcatctaaaattgaaaaattatattcttcccttgaccatttaataaatttaattaaatcatttttagaaattcctccaattggattaatatcagcacttgaacaatcatattttgttaaataacctcttaattgttcatcaacatttgcactacctaaaactaataaaccacctaaattttgtttatttctacaccatggtaataattgtgcaaataaatatgataaaaccattcttaatcttgcttgaatattttgtaatgctaaattttcaatttgacatcctccgaaaattttataaattggtctcttacctgtggtaatttcaaataatttaataattgattcaacaacaatatccatatttaaattaatatgatatgatccaattttttcacttaatcttaaacttctatcccttgtttcctttgatgaattaactgtacccatataacatgtatggaaaattaaattagcaaattcttcactattttttggtatttcatcatctttttcaattttcaaaacttgtttaatatctttaataacttgtaaattaccattttgaacttctttaataactaatttacacattgtatggattatcattgcagttgcacaactatcaatacctccacttaatggtaaaaaaaatccattacctttacaacgacgtaaataatcccataaccaacatgctggaccaagggcaatttcctcctctggtaaatgatatttaacttctttaattgatgttggaactaatgataaatcaaatttattaccctctggtgaaatttcaatatttaaaaattctctttcataaattggtgaaaatttactttgtaaaccatgtgaaattaatgatttatatgatctaacatcatctaaatcaattgttgcagttaaaacttcaatatcattaagtgaaaattgtgatgattgagctaatatttgtccattaacaattatcattgaactaccatcataatataatctatcaccatcacatcctctttgatttgaataaagataaattccaccacatttacgtgttgcttcaacaattaatgaaattcttgtatttaattttcttaattcatgatgtgaacctgatgaatttgttataatttcaattccatctaatgataatgatatatgtggtgattgtggtgtaaacatttcttcacatgtttcaaatccaattactgtatctaatgtttcaattactccatcaccaaatttaacaaattcttgtccatttaatttataaattaaatttggtaatttaaattgttcaatatattgagttttcaaccatggtgtaaaatatctcatttctctataattaccatcatttgcaaggaaaattttaggtctaattaataaaattgttccattatatgataaaattctacaattatatcttctatttttatgtataattggcataccaatatcaagtataatatcatatgttctctcatctttaagaattgtttcatacatttcccatgattgtaaataaatatcattttcaagaaaatgatctaaacatccatatcctgtaatctctaattctggtccaactcttaattttgcacctttttccttagcaattaaaattgattctaaaattctatctctattaccttcaaaatctaatgcccattgattcaatgagcatgtagccagtgtaacatattgtggcatgtttgtccaaaaagaatgaacttgttatcatttaattgattaattcagttttaatagtacaaaaatttatttaatttaatttaatttaatttaatatattacataatcacttagttcctcaatccttatccttacttacccttcttaatgacttaaaccttctagagaatgaattggatgattgtaatgcacttggaggtgcttcaaatgtatccagtgcacctccatcttcatcattttcatctagtttagtaactattggtggtatatgttgaggattccttattgatgacattctagttggtgttgttacattattattattattattattattattattattattattattaccaccaccactactattatcttctgatatatttgatgatgataatcctgctgttaatatatatggcattgacattccattatgttgcgatgatgtattaattgataatcgattcttattaaaattagaattagtacttgatggtgtattattatcatttattcttgaagtttgtaaaaattcatcatcaattgatgaatcaatattatcattaattagttcaattggatcatcatcaccaatattattattacccattgctctacttttctgtaaattatcaaaattctcacgtgcattctcacgtgcaacggccaataattcttgtgctttctgtaatggaattgttggtgttgaacatgatgaaattgcaggtatactatcatctaattcaattgttgccttcattaatgctgacatccaatttctcatctcttctcttgtttcaactgcaaaataatgaactttttgttgtgtaaatgttaaacctttacgtgatccaggtgcaggtggtattaatttaaaacaaaatctaccatatcctgcacttgcagcataaactgcacttaatttatcttctgcctcagttgcaggtaaaactctatgtgatgttatatcaattaatcctttctcctttgtatcctttgttgtaacataatatgataatctagttttatgtaatgtgaaaaatctttgtttccatgaaccaattgataaattacccctcttaaacatccaacctgaaatttctgcatctttaattgcttcatcaggtgtaattgatctaataccttcttgaaatgctgatgtttgtgatttaccatttctattacctgttaccattgatttaaatgttgattgttttgattgtaatggaggtggtgttattaatgattcttgattcattgtatttatttgtggttgaattggtgttttagatgatgtaatcccagttatatcacttgttaatcttttagttacatctttttgtttcatcatttgtgtataatctttagctgataatgatcttctctgcactgatgaatttgatgaattattattatgatttaattcaggtaattttgttataacatctctctccggtgatggagtatttgttccaaatggtttattaataataattgatgaatatctacgatgtgatttaccgttattattattgttattataatcatcatttttatcataattgttattgaaaatttcaagatttgaattgtcagaaataatacttgaatgtcgacgtgaataacttggactcattgtatcaacataaattgatgatgtattacccattgaagaatttctactatgactttgaatattacttaatcttggaattgaactagttaatttagttggagatctaataccaaatttttgtggattatttgcaactggtgatggataacttggaggttgaggtgctcttcttggtgaaacgaattgttcagaatcattatttggtaaatctaatgtatttttagattttctacgtggagttgaatttggttcatcattagaaactttatcaattgaataatcattaggtatattaatatgagaatctgttgaactattaaattgcagtggagatggagtatttttcaaaattttagaatgatcaataataactgattgaggtctttgattatttgaattattaaacctattatttattttattactaaaagtattatttcttgataaattacttgatgaacttggtgaatcaattgttgaataaattcctgattgattattattattgtaagtattatttttattttcaacaattgatcttaattcttcaatttttttataaatttcaaatcttgtaccaaatgaagttatatctaattcctttaaataagctaattctaattctaataaaattgaacctgaaattttatgaattttgaaattttctgcaacatcatcatcaacgaattgtttaaaatattgtgaaacttgatcaggtgtccaatttggtgcattaattggatttaatggattgttattagtattttcattattattattattattattattattattatcaatatttaattcttctaaagctttatcaatatcattaacatatctattaacagttgaagtattattagtatcattacttgaataacttatatcattaaaataagatgaaggagcagcagttggagttattggactattttgatttgttgtacgtctagatcttgaacgtaataatgaaggttttgaaattaattcattatcatttttataaatttgtgtgaaaacttttggataaagaccaattttatttgttgttaaatttttacccatataccaaccatcatcaaattcactatcatcactaattaaatcaattaaatcaccttcattaattgttaattcatcaggtaatcttgaatcaaatgatttaataactatataaagttgagtatgcgaacctattgaaacttgacgattgttactcattgttaatagtttgtagttatctatttactcaatgttttgatatataacaacagttaattaactaaaaagggtggcactcaggaagtttacaaaaagtaaaattattaggcggatttttcacatattgagaattttcactatttgttacgtaatacaatgtcttatatcttgtatagttataagtgtaaagaggttaacgagagaaagagtagatatagaaagatatagaaagagtatataaagaagtaaagatgtagagaagtaaattattcttcatcttctctaacagtattagtgattgaattcaattcctttgaataatttataactggttttgaatacattatatggttataatcaacaggtgtcctactaatacgtggagatggtgtaaaattaatataatcactcatactaaaacctggagttctatttattaaattcttattgttattgttattcattgatttattattaattccaatcggtgtacctaataatggttgcataaatgaattaatattattattattattattattattattattaggacttaagaaaaattgtgatggtaattgatttcttaatggagttgattcaatatttaaattaattgtattattagaggatatatgttttggggttgttggtatattgataattctttccttattattcttaattttactaactgatgttccattggttgatttatcattttgattttcatattcacgttcattttcatgttcattttcatgttcaatattttctatgttttgtttatttaatgcagtattagtatgataatttcttgcaggtgaatttgataaatataataataaatctgcacccatatcatcagaattattaccatttttattaggtgttgaaaaatctcttgttttaattgttgaagattttggtgttgataataattgtgattgtaatggtgcattattggaatatgtagtagtgattattgatatttataatattgatttcttgctttgatttattattagttaaattagtattgtctcgaaaaatatcaatagtttcagttggtggagttttaggattattggaacgttgattaattttctttgatcttaaatgtgtattatgatgttgttgtgattgattgttaattgattgagaagttggagttggaattgaaaaacctctattaagttgataaggacttgttgaattaccattactataaggagaaatattattattattattattattaatattattattcaattggaaattacttgtattaattctcttaacaggagaagctaattcatcatcataattattatcatataataaatttcttgaagaagttgttgatctataaattgaagaatttttccttttcagtggagaaattaaaggagttatagcagtaaatgatagatttgaattttcgaaagataatctattatttctagttggagttaataattttgaattttgaatatttgaaattgcagttgcagttatattattagtaacatcttcacttaaacttttagatggggaacttaaaggtgaagaattatttgaataatataaaaaatttgattgttcattatttatagtggtgatattagaattaaaattagaattagaatttgtattattagtggtattattagtattattctctaaatcattatcattattattattattaccattttgatcacgtacttttaaaccagctttaaactaatttatcctttaattgtctagtcattttagcaatttcaactcttttcaaaattttttgagcaattatatcttcatttgacattggagaagtttcagttgaagtcgaaggataataaatattattatcaataaaatgattatcagattctgacattgtagttttataggggaaggggggtggtaattttttgttacgatttaattgatatactatattaatgtgaaaattgttggaacttcaataaagggatgaatgattgatgattgattgatgaatatactaagcaaagcaatgatattaagagaaatgaatacgttaataataatgacttcaataataatactaaatactaaatactaaataataaagataaagcaatccaatacaagaatgagtagaaaccaatcttttccagtagcaaagacacgttaagaatcgattcattaatttgaatttgaaattgatttcagatggccgattgaaaaaaaattgaaattattcccaaaagggaaggtgtcccaaaagagtaatacatgaggactatcgactcttactggtttttaacaccgatatcttccttttttatcggcgttaagagcgtgtcacgtgcttttcttaattcctcggaggagagacaaccttattagtaataagatacctatttaggaattattattaattacaatcaacagtttctaagtgtttctatttgtttcttttaaagttacaattctattctgatttctatttaaagtgatacaacttcctaccttttttgaaaaaattcaatggcttctgttatttattcttgtatttattatatcaccaaagaattaaaggataagaaaaaagaaaagaaattatcaaattctaattctaaattaaattctaaatcaaaagacaaatcaaaagacaaatcaaaaaaaataaataatacacaatggcttccgttcctcctactgaattagcaacttcaaatttatttaaaccaattaaacttggtaatgttgaattaaagaatcgtttagtttatgctccaactacaagatttagaaatacaactgattttgttgcaactgattcaatgttacaatattatactgcacgtgctgaaaataatggtggtttattaattgttgaagcaactttcccagctcctgaatttggtttatatgaaagagctccaatgattaaaactgatcaacaagttaaagcttttaaaaaaattgttgattcagttcatgaaaaaggttctaaaattgccgttcaattatggaatttaggtagaactgctgatccaaaatgtttaaaaaaacataatttaccatttgttgcaccatctgcaatttattttgatgaagattctaaaaaagctgcaattgaagctgaaaatgaattaagagaattaacaattgaagaaattcaatcaatgattaaagaatatgttgcttgtgcaaagagatgtattaatgaagcaggttttgatttaattgaaattcatggtgctcatatgtatttattagatcaatttttacaagcttcatcaaataagagaactgataaatatggtggttcaattgaaaatagagctagatttatgttagaagttgttgatgcagttattgaagctgttggtgctgataaagttgcaattagattatctccttatgcagaatttcaaggtgctttaggtattaaatctgaaattaatccaattgttacttggggttacgttttaagtgaattagaaaatagagctaaaaagggtaatagattagcttatatttcaattgttgaaccaagagtttcaggtattttagataattttgataatgcagcagttgatttttcatggcctgcattaatttggaaaggtaatttaattagagctggtggttatttagatgctgcaaatattagtaaattacctgcaattattaataaaactgataatacattaattgctgttggtcgttattttacttccaatcctgatttagctaatagattaaagaatggtttagaattaactccttatgatagaacaactttctataaaattggttcaaatattggttatttagattatcaaaattatggtaaagaaaaggaccactcaaaggatgatgttgaaataaagccattagcatagatttatatatattatatagattaccaatttataaaaatttcattaactaactaattatactaagaaaaaccctctcataatataacacgcactgataactttttaaatttatttactcgtataaaagaaactgagttcgctgtttttcatgttttaataaccctatgactattcttccttttggcaatcaaaaaggagacacatttaaggaggtatttgccacgatgaattaacgagcttttccatgtttcttcattgccatttactaaaaaagtaataatttttccctccaatattattgtactagtgtctggttttccccataggaagtttattgaatgtgattaagatattcagtaaatgtcgaaaaggggacacatttttcttttcttttttaattgattttatctataactgtgatttaacgtaattccaaccttgtaaaaaatctttaaattgatctaatgttataggtttaccactaaaccttaaatcttcatataatttaagaaaattatttatcttttcatcattattactatgattttccaataattcacttaatgaataatgattatcaagttttaaatatttaccattttcattaattgttaatgtaccattatattttatctcttgaccaataattcttacaacattttcataaattaaattatctggtaattcattattatcattatcattattattatcattaccactttgatgaaataaacctggatgatttatattacctattggttttgccatttttttaattttttgacatctaatcattgattgttcaattttattactaaatgatgatccaatatctctttcactaattggtacataatttttaggtatttcctctaaaataattctattataaattaatctaaacatatcaattgttgcatatgaaattacgaaaagtgcaatgaaaaccattataataacagtatttgttgctaaatgtgaattataagttctactttgaattataatatcaattattaaaactgttgaaaatgttaaaattaatccaataagtattataaatgatgtagtataagcccaatggaaactcgcatctttaggtccagttgaattaactaaccttcctattaacattttagccttgcttaatgaaagaacgatatagggtatattctacttagcaaagattattaagattttttatttagcgattttatttaattttttatcaactggtttgtttcatcaatggatcgattctttggaattcatcaatcaactatttatttatttcaatatcatcgtcagaatatattgatttagaatgcctaatctctctgtcctcatcagaagtgttttctgtgtctgatgaaaaaacatcatcatcagaagataaagttttatcttcatccaaatgttccattgaataaagggctgatagatttcacgaaattgactatcaatcaatccttcataatccaatcattccaatcattatatgtaaagaattctcacaactatatcataagttctttccataattgaaaaaacttgtttattgaagacttttctttgctaaaagtaccaggaccaactcttttcaaatcttcaaacttaaatgctttccctttctctatcatccatccttgctaactcaccaatatgataaccatctactgtaacataccataatagatgtttgtactgtacgaggaatatgatttttcattttatcaaagattctttttgtcagctttcctatcaaaactgccaggaatcgaatcttctattagctgctctataagtaagattgttctttttcttctctaatattttattccctttatcaattattttgtcaatttcttgataatccataatatgataattatgcttatccgtttcagtgaaatgatcataagtctttgctagagcatgtagccttttcacgaatttgtttgaacgttatcttaatttcattatctacagaaacaacattgtaacaagctttaaaaatgattacaagatttttaaaagtaaaatcagtattagttttaataatatcatttaatgaagttttaaacttactacaaaactcctcaattattttatcatccatattttagccttgttatcactgatatattgagaataatgggtatataaagaaggaaaaatatagatcaaaagtatgaaaagtaatgagccttcaaattcttaccttttccatttactgtgccgctacctttggtgtttactgcgccgcatatttaatttactatgcagttgcaatgggaaagtggttagttgcaacgtagattgtgaaacgattttatttctgataactttcagataaagaaaccataacaaaatcggtaagatatactctatttattaaactgatatagtaaactttgaaaatacatttacgtcattaattatgatcgttccttttactgctgtttaaagtaaaaattaaaactcagtttatcttatcaattaacagtaccttgatatcaatgacataataagaaatgaaaagcaaaacacatcgcttagtataaccacaatatcaaatatacacccccaagtcttcatataaaccctgcaactacaagcgatataatgtctaaggctataacacaataacaacagaagccgtctctctcggtaagaaatgccatagaataattaggatttgtaatgcccttcacttcaccgacagcgggcattcccgttaatctttactgcgcctggaacggcagtaagaagacactccctctaaggtattacctctgaagtcattacattatcataagcctggtcatgcttcggagttgcggggaacttaatacacattcttctctgatcacagtattactatctactatatgtataatgtagttactttactatagaagagcagaacataaaataaaagagacatcaaaaatttgacgtatttttctgtcatcggagaaaaagggaagtgaaaaatttttcttctctttttgaggtatatattttagttaattgatagagagatagatagcagatcatctcatgttattggttgatgagtaattcaagggttttttttatttacaattatttcccaacataaattcctactttagtaattactacattagtcaactctaaccgccctatagtgtatgactttacctttttaccacatcacgtatatctatagcaaagataagagaaaaaatatttcttttttcaaattatcaggaaaacagcatttttttatctttgattcatacttttcagtcatggatctcttcttgttgtttaattattatctttatctccccgcattatctttagtttattatgttctgtatctctttatttttttattgaattcttagtatttatctaaacctttattcccactttttttctcttttgaagtaatgtcatcttcctttctaattttaactctatctcatttgacaaaaaattaaatcatgattaattattttaaaagtgaaaaaagtaaacagacaagtcaggttcatattgaaacttatcctgacgattcaataaatgatatttcagaaacttataaatcaagttctccaacaccttctcatccttatgatataacatctcatgcagatgttgaaaaaattggttatgaccctgaagataatggtcttggtgaattaaaacgtggcttaaattcaagacatgttcaatttatttctttagctggtgcaatcggtaccggtttattcgttggttcatggtgcagctctttcagtcgcaggtcctgctggtttattagttggttatttagttttatgtttctttgtttggtcaattatgaatcaattagctgaaatggttacttatttaccaatacctggtaaatcaactccttatgctttatgtgaacgttatactggtaataaatctttagcttttgctgctggtttaaatcttttctacgctcaagctttattaactcctgctgaaatttcagctgccgcttttgttatcgaatattggactgatttgaatgtcgcaatttggatttcaatcttttgggttacaattgttgcattgaatttttgtgctgttaaagttttcggtgaaattgaattttggattgcttcaattaaaattttaactttaacaggtttaattattgttggtattgttatctttttcggtggtgcaccagattctcatggtgttttaggtttccattattggaaacatccaggtgcatttgttgaacatttaactggtggtaatacaggtaaatttttagcttgttggagttcaattattaaatctgcttttgcatttattttatcacctgaattaattacaatttgtgcagctgaagctgaagctccaagaattaatttaccaaaagctgctgacagatttatttaccgtttattctttttctatatctgtggtgttttagttattggttgtattgttggttcaaatgatccacgtttaatgagtgctatctctgatggtgctgaaggtgcagctgcatctccttttgttattggtattcaaattgcaggtatcccagttttaaatcatattgttaatgcagcaattttaacttctgcttattctgctggtaactctttcttatatgcatcttcaagaactttatattcaatggcagttagaggtgatataccaaaagttttcggtagagttaataaatttggtgttccatatgtttgtgttgcttgttcatctgcaattactttacttgcatatcttaatgtatcagattcttcatcagttgcatttgcttggttttcaaatatttcaacagtttcaggttttattgattggatatttgtttcaattacttatttgagatatagaaaagcattagattatcataatatgaatgatagagttacttatagaccaccaattcaaatatttggctcttatgcatgtattttctttttctcacttgttgctataacaaatggttatgcagtcttctttgatttcaatggtagtgatttcgttgctgcttatattacattaccaatcattgttggtgtttatctcgcacatgcaatatggactaaaaattggatgattttcgctaaacctgaagatattgatgtcgttacaggtcttgaagaaattgaagaagaaactagaaattatgttaaacctgttccaaagaatttcttacaaagaatttggttctggattgcataattttaactctaattccaatcaccactttatttattaatacctaccctattgacgaatactctttatataaactcatgtataatataatattatttaatcattaataacttaaatctctttaccataaccaccttaatgttaatacttacgtaattccttaataaaattcactgaaaaaaaatttcaaattttttcctcactcaagagcttttgaattgttcagtaaccactctttgtcgagtttaccaaatcgtgaatcatcgtttttatttaaaatttccttcatttatgatattaacgcttggctatttgaacagtagacaatgtcggatggttctgctattgaaacgaagtgggccgatgaaatcatccccttgttaaaccaattaaaatcatcatctgttaatattttagatgtcacattatttaaaattaattcagtattacaggatgaatctgaaaaattagaaaattcacaaaaagatttaatattattctcaattttatcaacttttacaagatatccatttgatacaaaatttaataaattaattttacaatcttttaatcattttattaatattgatgctgaaaaatattcaaaaaatattcttgcatttattgctaaaaattcagcacaaccaattgcaactagagatttacttactttgattaattggaattggtatattataactttagttgctgacaaagaatactttaattcattattaaaagttgcaattaatacttcaattagtttaattgcttcaattactgaatatagttcagttgaaaatttgaaatttcatcatattagagcaattaaagcttttaaaagatcaactattaataaattaatacaattaattaaaaaagatgcaaatattattaactcaattgttgaatttgtttgtaatgaaaaagctcatgtctcaggtattatctccttattaggcttattatcaatatctgttaatcaaattaccgataagactgcaaaatcattaatggaaaataaggaaaatgaaattgttaactttattgttaaaattgttttcgcaaccaaaactgttccaaataaggttgctttagaattatttggaaattatgtatcaaatttcatttcagaggaatctttgaagacaattttgttagcaggtttagaaaaagcagctttaagaaattctgaattaactttttctattttagctccactatttgcacgttcattaaattataaaaatattaatgttttagaaatcttttcaaaggctaaatttttctcccaattattctcttcattaaaagcaactaaagaatccgttaaaattggtgccagtaatgttttatcagttattctgcaaaataatcaatctgagaattcaagtgatgttttatcctcatatgttgatgaaattttcaaagttcttaaaagtttatcagctacagctgttgagcaaaaaagtttggtattgaaagttttacaagctgtatccattaatgatgtacctgcaagtaataaaattatcgattcattgattccatatatcgcaaaggaaaataacgaacaaattttatcaactgaatgttcaatcttattaaatagatttgtttacttattattggaatctgatattgttgagtcaaaggaaaaaatattcactttaataaataatggtattaacgataaaaaaatacctgttaaaatttcatggtgtacctcattagcaaattctattacatccgttgatcttgaaaataatacatcatcagaaactaagatacttgaattattaaattcaggagtttcaaaatcattattacaaacatttgatgattgtgttaatgccccattaccatgtattaacaataaatcaatttcagcaggttatgcatctcttgctattcttttatatattgatgaaatttattcaaatactgaattaaaacaaaaattacaagagtttaacgttattgaaaaagctttaaatgataccgaaactaaaatgtcatgttttgttaatccaaaaataatttctaaattaacatctgaattcgcacaagaatggtatatacgttcattattttatatttcacgacatttaactgaatcttcaccatttttaggttttgctattttatattcaacaatttcaagaaatgttacaccatcatcaagattattagctaaaaagttacttaaatccgcttatgaaactaatcaaaatgttatcggtttttcattaactaattcattatataatttaattgaagattcatcaattaattctgaatttaatttagattatcaatatttattgccaacaatttctactactttccatacttttgataccattgatcaatcaattttagaatctcaattagttgatttattatttatttttgaacataacttactttcaaatattcctaatggttgggttagcttatgtcaaaaatgttttgctgatccaggtaaaattgtttctaaaaattctaccagcattattgaaaagatctctaaaattcttgttgatccatcagaaaaagttctaaataatggtatttttgatgctgcttgtaaaacagtttcaattatttccttcttctcaccagctgttattgttccaaaattatctcaattaattgaagaagatttgtcaattgtttcgaaattagatattgatgattctaaacttgatatttggaaaggtactgatgatgttcttgttgttgatgttttacaatccaaatctagtcttaatattgctaaatctaaagatgccgaaactttgaaatgggaaagagaagttcgtaaagaattagatgctaagaaaaaagtcgccaaaaaattaactaaggaagaacaactcaaagttaatgaacaattaaaattagaaaaagaaattagaaattcaattaataatgattacttaaaacttcgtcgtggtttagaaatcattatttcactttcaaaacaagctaaatttgttgataatggtactgaattatggtttcctgttgctatttcaaatattttacatttattaaattcatcatctgctgttaaacttactggtgctttatcatctgaatgtttcttatctctatctgatgttgttgcaactgattctttatcaggtacttccgatatgaaattcattggttcatctactttaagattatttaatgttagtcatgttcctgctaaatattctggtatcgatcttaacgaattattagcatctcaactattcagtttgaaattatgttctgataaatcattatttactaatttgatgttaatgtacgttttaccattattaaccagagtcattgaaattggtaaaaattacattttgaagaccggtaagaaaacggttaaagttaacactgaattctcagaagattcaccagaagaagaacaattaattttagctttagaaattatttcatccaattcagatttatttgaaaatgaatccattccaagaacctcaatcattgaacatttaatagaattattagcattaccatctaaatccaaaaatgcaaaagagtgttttgtttcattatgtcaaaatatttcagtcaatatttccgattctgatttatcaattattctaaaatcattaattacaccaactgtttttgttagaactgcattacttgaagttttagatcaagaaattgatttatctgaaaaatcattcaatgaagaagtttggatttcatgttttgacaatgttactatcaataaagatattgccgaaactatttggaatgaagctggttttaaattagatgacactgttccttccaaattaatcaaatacttaggtaataaggataatggtattagattatcaattgctagatcattagctgcatctgttattcaacttgaatccaatgatttattccgttcaactttatcagatttattaaacttatacaatgaaatgtgcaaacctcctactcctgaagttgatgcttacggtttagttattcataatgttgataccatgaaagatagatgggaacaacgtagtggtgttgcacttactattgcacatttagctccgatgttttcaatttcttcagaagtttcaaatttcttcagatttttaattaaagatagagctcttggtgataaggaattattagtcagatcagaattacaagaagctggtttgaaaattattgaagctaatggtaaggataatgttgaaattttaatttctatttttgaagattgtttggctgaaaaggatgaaaaatcaaagattcaagatatggttaaagaatcagttattattttatacggtactcttgcacgtcacctagataacaatgatcctagaattgaagccattgttaataaattattacaatcattagatacaccatctgaagatgttcaatatgccgtctctgaatgtatttcaccgttagttccattcattaacactagattatctaaatacattgatgatctttttgaaaaactttttacttctaagagacttgcaattagaagaggtgctgcttatggtattgccggtttagcaaagggtgtcggtattaaagctttatgtgaatatgatattattagaaaccttactgaagcctctgatgataaaaaggatactcaaaagagagagagtgttttatttgcatttgaatgtatctcccaagcttttggtccattgtttgaaccctatgtcattgaaattttaccaattgttttgaagagttttggtgattcatctgcagaagttagagaagcaaccgattatgctactagaattattatgaagaatactacaagttatggtattaaaaagatgattcctcttgctattgaaaatcttgaagatattgcctggagaacaaagaaaggttctgttgaattacttggttctatggcttacttagatcctgcacaattatcatcctcactaccaaatattattccagaaattgttggtattttaaatgatacacataaagaagttagaaaagccgctgatgctgcattgaaaaaattcggtgaagttattagaaatcctgaaattcaagaattagttccaactttattaaatgctatcggtgatccaactaaatacacaaatgatgcattagatgctttaattaatacacaattcgttcactatattgacggtccttcattagctttaattattcgtgttatcgatagaggtatgcaagatagatctgctaatactaaaaagaaagcttgtcaaatcatcggtaatatggctattttggttgatactcatgatttaatgccatatttaggtcaattagttgttgaattaaatgaagcagttgttgatcctgttccacaaactcgtgctactgctgctcgtgctttaggttctttagttgaaaaattaggtgaagataaattcccaggtttaatcgctaacttattagctgcattacaagatgaagaaaaaccaggtaatagactaggttctgctcaagcattagctgaaatcattagtggtttaggtatttctaagttagatgaaatgttaccaattatcatcaatggtacaacttcatccaaaccgtttgtccgtgaaggttatatgccattattattatttttacctgtttgttttggtagtcaatttgctccatatttatctcaaactattccacctattttagctggtttggcagacactgttgatgaaattagagatgtttccttacgtaccggtcgtttaattgttaataattatgctaagaaggctgttgatttattacttcctgaattagagaaaggtttatctgattataactcacgtattagaatgtcctctgttgaattaactggtgaattattattcaagatttcaggtattagtggtaaacaagaattagctgatgatattagtttatctaagaacgtttcaaaggctttcaatgaagttcttggtgccgaaagaagagatagtgttttatctgcgttattcgtttgtagatcagatacttctggtgctgttagagctactgcttccaatatttggaaagcattggtcgcaaatactccgaaaaccatcaaagaaattatgccaacacttatcagtattattgttcgtcgtttagcttcacctgatgaagttcaaagaagtattgctgctgcaactttgggtgatatgattagaagagttggtggtaatgcattagaacaattattaccaaccttaagagagacaatgtacagtagtgattcagatgctaaacaaggtatttgcattgccattcatgaaattattcaatctacagcaactgataatgttattgaacatcaagatatatttgttagtgttgttaaggaagcattagttgatccaaatccaaatgtcagagaatctgctgcattggcatttgatgccttacaagaatcaattggtaattctgctgttgatgaagttattccacaattacttgagatgttgaatacttccgatggttctgatgatgcattatgtgcattacaagaaatcatggctactaaatcagatgttattttcccaattttaattccatcattattaactcctccaattaatggtcaagctattggtgcattggcagaagctgctggttctgctctttacaaaagattatctactattatcaattctcttgttgacggtattgctgagaacctcggtgaagaatctgatttatactctgctttaacacgtactatgttatctgttgattccgatgctggttgtcatccattaatgcaacaaattttagctattatgaaacatgatgatatcaccaagagaaacattatttttaaggtcttacctgaatttttcaaagaaaccacattggattactcaatttataccgaagatgttgttactagatgtatttacttattaaatgatgctaatactgaacttgctactaaggcttgtgaaactttaaccattctcatcaaaaagcaatctaaacaaacgttggaaagacttacaatgcctgcacaacaaagtttatcattcattcaaaacgaaacaaaggaaatttttgcattcactttaccaaagggtccaaattgtattttaccagttttcttacatggtttaatgtatggtaatccacgtcaaagagaagtttctgctaatggtatttctattatcattgataacacacctgcaacaggattaaaaccatttgttacacttattgtcggtccattaattagagtcattggtgaaagattcagcggtgaagttaagagtgaaattttattagcattaaacaaattgttcaccaaaactccacaatttttacttccatttattccacaattacaacgtacttttattaaatgtttgtctgatccatctaatgaactattacgtactagagcagcaaaggctcttggtactttaattaaataccaaccaaaggttgatccattagtcaccgagttgttaaacaatgctaaggctattgattcaaccaatttagctttgaaaactgcaatcttgaaagcattacttgaagttattgatgttgctggttcaaagatgagtgaagttagtaaaaatggtgttatgcaattagttgaagaagatatgtttaatgaagatgccggtgtaaatagtgctgttgcatatgcaagattagttggttcattatcaaagattttagaatcttctgaattaaacaatatgttaagagctaagattttatcatgtgatttgaatgatgaaaataattctagatttgctattttaacattaaatgcattcctaaaagactctgcaagtatggtcttgaattgtggtttactacctgaaatttgtgaatttatgattaatgcttcaaattctccaaaatcatatgttagtgataatgcagttttagcaattggtaaatttttattatcacttgataaagttgaagaatttgatcaatcacaaatcaataatttagctaaacaattatgtgttacaatgaacaaacctacctcaaattctccagatacaagaagattttcattggttgttgctagaacattatgtagatatcaatacgataatgttattttaccaaacttaaatgatattattccatcagttttctcatgcgttcgtgatccagttcttccagttaaattagctggtgaaaaggcatttttagctgtgttaagattagttgaagatgaatcaaatagtataatgaccaaatgggtagaatcattaaatggtgaacagactgttaataatgcagttggtgctactttacaattaagatcaattactgaatatgttaagagagttggtttaaggttaggtaatgttgaaagagaaagaattagtgctggtggtgataaggaaactatgttctctgatcaatatgaagatgaaaaggaaatatgggctattggtagtgttgacttatcagaagaatagatggcgtttactatattagatttagtaaaattgttttgtgtttataaatttttatttagagtttttttaaaacttaataatacgttcttagaaaataattgtgctgatggtaacagcagtcgttagaatataaaatgttatttaacaatgtaaaatgaatgtgtatagtataatgctaatcatgaaataactttctctatttcgttcaatagttcattacttatttcggaatatggtaaaccacaaatggttgatattaactttttgtaaacagataattttgatttcatcatttttaagttgtttgcgtcagattttgatatagttgagtcaagaaaagcttcatcaaaggaaaaatcattattatttgattcttcatcaatatgcattgtaactctcttttgaattatttttcttcttattatttgtaataatgttaattgaattgctaactccaattttttaccttttggtttcttcaaatcttcatcgatattatcttcttcgttacgtactaacttggcaatttttagggcctgagaacgtccataaagatcaaataaatgctttgtttgattttgtagtttggaatctatcttagacaaattttgattgacaaatgatgttatattttctgagtccaagcttgccagtttattaaaatcaatattagatatatcttgatgactacatttagctatctttttcagtaattttccatttttagttgtcaaagattgaatattggagttcaggttgtttatactgtcaatactataagttaattgatcagttttattttccaatgatgacttcaatttgcatatcacgttcggtaaaccattaacaaaattatccagctcattaaaagaaatatttgattttttaaccttcaaatcttcttcaatagattttgccttatcagttacatcagaaataggtaaatttgattcagctttaattactttttctttgataactttactaggtgtagggctaagtaatgtatcatttctattgtttttatttgaagtaaaactatttgtcatgatagcatcaaacatcacattctctttatcgccgtcttgatcttcactttcgggagttctttgggcatcaatagtatgaggtgtatctttaactttatacttaatatttgaatcatatgaattttccaaaaatgggttcttatcatctacaattagtgaattatctttgttggtttggctttctttgctaatattttcattatagttatttatattgacatgatctaaaagtggataatcattatttcttcggtaattttcatttccaataaaattatttggattaatattatcctcaaatataggttgattttctaccataacattattttgatttataattgtgttataattttcgaattgctctgattttttgtttaactctttgagtatatcgggatgaatattatgccaacctccaacttttgaaacatcagctccattttctaataatagtaaaataaattctttacaatttgaacgtaatgcaatatccagtgcactttcaccatttaaattacaatgattaataagaagatcgagtaatttcttcttatcattagtggttctagaatttctttctgcttcattttgttgatttttaataaatgttaaaatattttccagatagtataatgtagctgcaattttatcttcatttgatgataattctgctaaatagtgtactggagtattttgatgagcatcaggtacaattaaacaatgttttaataatggcaaaatttcatgaaagttttttgagtcacaagaattgttaaaatgaattagtttagataatgcattcattccctgaatatttaataataatgtatcagcatttaatttagttaaaatttttataactttaagagatgcaagtgcacaagcccaatgtaatggtgtatgaccttcatcatcaattgcttgattaacatcaaaatcttttggtggattatataaaaatggtggtatttctgtatcatcaacaaaaaaacttattaatttttttgtaaaatatgattgattatcaataaattcatcaaattggtgattattattaaaactatttccattatatgcacttaaagctgaatcaattgaaccattttgttctgtatttatatgaggagatgaatgatgacgtgtatgcctgtatatacttcctgggctttgaagcatatttaattgtgcttttgatattgctggatgaactctttcttcattattttcatttaaataatttgaatattgttgttgatattgcgtacttgatctaggtctgacaaaactattattaacatctattggtatataacttctatcaggtgatataattgattcattaccaaattgcatatgtgaattatcagtggatacaactgaatcatttagttgattttgaacatatgaatcattttcgtgaatagtttgcacactttgagatctataaaagttttgatgttgttgttgtctatcaaatggttcggcatatttaagttggtgtgatgaattttggtattgatgatgtggatgttgattatgctgacggtgttgttgcgcatgatgatgaggtggatgatgaggtggatgttgttgttgttgctgttgttgatgtagtttgtgctgttgctgctgaaagtattctaattcacgttgagctttcaattggtaaggttgaacattatgaccaaaaaatgcagcatccgagttcaatcgattgtttgaaacaggaggagctgaatgtggagttggagtaaattcaccaaaattttgaggtatatgtgaagctgaccttgatttactatgtaatctaattggagattcattatattgaccaaaagttggaggtaaagtaaggggtaaagcaataggttcaactcttaaaggtgttgattcttgaatttttttcaacttttgaggagaattgagctttttaggtaattcatttttaatattattattatcattaatattataattgtcagtagtagcaaaggatgaagaagattcaattatttgaggtctcttcttatttaatgattgattatccatattggaagcaatggaagtggaagatgttaaattttgtttttgtttttgtgtagtgtttaatgtatttgaagtatttgtagcatttgattgtttatttgtagatgatttatttgatctggtagtagatttaacttttacagcaatttcaggtgaattttcaggatcgaaaaataaaacatttaaattctccctttgaatattatgtttcaaagctaattcttgagcaaaatccagtggtacccatgttccttggaatttgccatgaccaccttgaacttttttatgaactaattgatgaacttctctctctaaaatacgagttctttgagttttaaggaaaccagcaattttcaaaatttgagttgcattaacccaattatcatcacatcttctcatcaaaggatatccattgattatactttcatagacatctatattagagtaagtggtcttgtatacttcttccattccagaggtgggtaaagatgctagaataagaataaaattgagagataatttggaaagtgtataaaaccttatatattaaggaccccccagtctgtgatgataactgttccagtgaaaatcatggacaatatactaagatttcccttttcggcgataattcacaattcttacacgcactcttcaattttttcatttttcgtgtcgtcatttaccacgattacgtaaggcggctgggtaaatttatctttcatcatgaatttataatccattccattctgttattcattaatcctttcttgtaattttctactggtactaagcctatagaagtatggagaaggggaaaatatacatgcatgaaggtgccgttcaatcatcaacccaggctttgactgatccacccctatattctatctttggaggaagaaatatagtcttttcagaaaatcaagatgaagattcaaatttatacaacaatctcaataaacttaaggaaaataaggtaggaaatcagacaacaaacactcaaaatacatataccacagcttacagtacaataactttcaataacttttttaaaactttattatttggtgttatcatattctttcttttcaataatattcatgaaaataatccaaatataattccagcttttactacacatttcttaaattttatagtatcacatgaaagtaccaaaggtttactatcaatttttctgttaaattcattattacttgatatttcaattttaattataggtttattcttaaataattatactcatttgaaaaataataaaactaatcgttcatcatttgttcaactgattgttgcacttattggtatagtttattgttttaaaaaattatcttggaattcaacatatcaagcagatttattatttattttagttaatgcaatttttgttaaatatactgattgttcagttactgaaagtttaacaggtatgattattttttcatcatctttattatatgattcattatttaatgatattaaatcattagatattaacctgtggagagcttgttttatgtttttaacatcaatagttttaatgaaatcaaagaaaacaaatcatttattttaatctgcataattattgtgatttcaccaaattaatacagttatttacttaccccatattcttttctttcttctacgtatatcccacatatttacattttaaaaaaaatatattttcgacgaacaaaatagcttaactatcaagattattataattataaaaaaaattaaaaaaaggttaaaaaaaacgtatactaaacgttacaaaattattatttaatgaaaatatagccacctaatgtttcaaaattatattgattgattatgtttttgttcttaataatatctaactaattagatacatcagatacatcttcttctaattttgatttatgaataacgggacttgagacactgccagcagcaactgaatttctattaattctagcaacattttcaatttcagggttatgtaaaggattcaatatccctacttgttcaggttcatcaactttaccatgagcttttgacattgcataatcacctgaatcgaaaaatttcctatcctttaatttaccacgtaatatatcattagtttttggtaatttcccatataatttatataattttaattcttgaggactcaatgatgataaatcaacattatttgttggtggtgtgtatagtggatcgtttggagataaattactcattgtattgtatgttctaaatgatattgagtgactaatacttattcaaagacaaggcacacatgccactcatctccttataagcctttaatagctcaaaaaaataaatcatttgccacccgcgaacttggggtaattcaaattcaaatttcgattattttacgtccccgggtgatgcacagtcgcgtcgcttgcaatgttagtggctcatctattttaattgttgatactacttcttcttcttcttcttcttttgcctctgggagtatgtgcactgttacatgtagtagttgggatagggggaatttgtgataagttaagcgttcagagattgtattaagtgtagagttttcatctgcaattaaggaaatatatttattttctaatatttgaattcttgaaaatgtaactgattttggtaaatcaattgattgtaatacattgtcattacttaatgtctctattaaggagttcatttctttagttgatagtgtcatattgtaacataatgttaaatgtaattcatctggaagtttggtcaatggatttattaggcaattcacatctattctaatatctgatttattttcaaattgattaaaaatttgttgaaaagtttccaaatcatcattactaggctctatttttaaataaatgaatgtagtttctgttgaattggaactagttgaaactttatttgcaaaaagtggagttttggaatatttattgaatagaatattagatggtaatattaactctttattgttattattctcttctttgtcattatcttcatcggaatcagaataatatggtactaaagacatacttcataagaagtgtgtgtattgttctattcaacattaaaagttcagtgaaaactttaattaattacgttatcgatgcgtccagtcgtcaaaacagagatgaaaacaaacgcgctaacaataacatgtaattttgtttacttttcaaaattatcaaaagattaatttgttcaacggtttattcattttgcagctgtggttatagtgctttccaagcacaagcaaaaattatctccaattggcaaaacaattaatttcaatctttttttcctgaattgaaagaaatatacaatagatatagaaagcaaaatattgtctaaataaccaatattggacaaaaaataatttacattttcaaattcagcaattatgtacactggatctacttcagaattccaaatatacaacgataataataacagaagatcatataatcctttcattgcagattcatttggaagtcaatcatctttaatgacgtcagattcagatgaaacgtatgataaatatgaggaagaacttttcaataatggtaatccatttaaatcacctacaactccaattactccattaactccaataaataataaaaatgtttccaatattaatggggatactaccattaatgaaagatttatgaaacgtccatcattgagaatgcttcatgatgaaaattcaaatataacaaaatctccaataaatcgaataacttcaagttataataataaaaataaaaattctccaattaaatcatctaaaacatcaatttcatcactatatgatataactaatatttcaagtgctagaagttcaatacgaaataataattctaatagtaatttaagatcatattctttacataaaaatgatagtacattatcaattgaacaaaagaagaaaaaaattataaggaatttaaataagagaaattctaaaaatttaaaaaatccatatttttatcaatatgataaagttgaaaataaacaaccaaatcaaaaattaccaattttaccaacaacacctattgaagataatgtgaataataaagatttacaaactcaacaacgaatagtggatttgagtgaaacttcatcattttctgaaatttcatcaaatttattaatgcatgatgattcacttcattttgttgatgataaagtaataattcaaaattcatttagtggttttagtggacgaaatacgaatgtcaatcctgggaagaatcacaagaatcaaaactcaaacaatcatgaaaataataataataataataacgataattttgaaaaagatcacgacgaaaataatgggaatacaactggcaatgatgcaggtgaacctagtgatgatagtaataatactcaggaagaaaaaactaacaataacaacaacactacaaattccggatcaacagataccactgaatcttcagattccctaaaagatgttaataatactaatagaaacagtactgcatcagtgattaaacaagcacagagaagttcattggggttatttgttgaatttagtcctactaaatccttatcatttactggtttgaataacaggaaaagttatattgaaaagaataaatcatttcaaaattcaacaagtagacgtgattctgaaattacagttgcaacagagaaattaaattttgaaaaaattgatccaaatgaacgaatatcatcaattaatataagtcaaataaaggcatcaaccgaattatcacttgattctataccggatgaaaatgatgatattgaagatgctataataactattaagaatattaatgaacatgatgggaataaggaatcatctgatggtgataaagaaagtagtgataatgattataatgaaccaaaatttaagaaatttaatttgaataatgattcgactgtttcatctgtacatactcctaatgaaacagtttcattaccggttaaaacattaaaacagaaacgaaaaccagttccgttaccattgagtaatgcaactccgaaaattccagctttagatattgacttatccgaggaggaaaacttaatcggctatacatcacagggatcaagggaagaactattaaacaataaaaaaaaagttcatataaatgataacgaaaatcacagttataattctgaatacgatgaaaaatattatgaatctaattatagaaccaaatgtagtgattcaattgcaattttattaataattttaagtataattgcaccgccattttggttaatgatatttatgggtaaattagattcaacatttggtaaatttaataaaactcaaaaaataattagtctaacaatgttcatcatattcaccattggagcaattattggaatagctgttggatttggatatggtttgactcataagtagtaagtagtaagtagtaagtagcattaattaagtaaattgtataataaacgttccgggtccaatgaagaggcttattcgcgaggttttaaagctgttttagtagggggtgggtaatgggcggagggtattcgggaagataaggagaggtgttataatataacttgtaactttataatacaatcacccctgtttttcaatagaaattgttcttttctgtatactcaattaataaacgatatggggaatgtacctgggaaggaatctaatggaaataataatggtaatggtagtatgtcaacagctgcatttacaagagaatttttaggtggtgatggtaatttaaatgggcaatttactggtggattaagatatagtagtagtagaaagggtaaaaatttcgaagatccagttgttaggcaaaggaggaaagagagagagattcagaagaataaatataggaataaacaaataatgaatttagttgttaaaattaatgaaaatgttgatggaggatatttagctccatatgattgttataaatatgaattagattatgaaactgatattgtacgtgatttaataattaatagggaattatcaccattttttataccattacaagattttaatgaaaattggacaaatgatgaattaattaattatattttaaataatattaaattacatgaaaatattaaaccaggagatttagaagataattttgaagatcctaatgaacatagattacatgtatctgcaagttcattaaaacgaaagcaaattaagattcaaaaaatgaaaatgaaggagaatgcagctgaattacaaaatactgaaaatattaaatttttaaaagatattaagaataaggaaagggataatgataaagataaatatttacaaataccatcaaatgatttattaattaaattatataaagatagtgaagaatgtccaatttgttttctattttatccacaatatttaaatattacaacatgttgttcacaaccaatatgtagtgaatgttttgttcaaatgaagagacttgaaccacatttcccacatgatgaagaggataataatagggatgatgaagataaagatccaaatagtttaattagtgaagttgttaaatgtccattttgtgcaattagttcatttggtataacgtatacaccaccaaaggatattagtgttggtattaatggtaaatgtttacctggagagtatattgaaggtaaagataatgatagtaatgagagtaataatgatgataatgataatgaaagtaatgagattacagaattagatatggaagatccatttactaagaagaagataccagctgttaataataataataataatattaatcataataaagaaaagaagaataaatctccaacaattataacaattgatcaaattcgaccagattgggaacaaaagttattaagtgcacgtactaagatggcacgtagatcagctgcagcaacagcactgcatgcaacatcacttttacaaggacatagtgggcataattatagtccaaaccaaagtccgaacaataataataataataataataacaatttccgaagtaggggtgatagtaatagaaccagtggtagtcaattagaggccatactgattgaggaagcggttaggttatcattactggatgaggaagagcgtaagttacgagaacgagagaaggagagacgtaggaagtaattaaagttactaataataataattatatgtaataccaagagtcataaaaagaaaagacataatgctaagaagagcgcttaaatttgtaaaattacttattacgaatatgaaaatacttacgaaaataatggtgaaaatttgacagtcgtcatttctgacactgtctttgattgtatttgtgtataacggtttgtattattattattaacttattaacttatatccgtttttgtttctctttctctttctcttctctatctctatctcttttattaaccacaactggagaaacattatggattctgcgtccatctgggacatttataacacagctactaaactgttacccctatctgaaagaatgaataatagaactgttcgtcaacagtccgctaatattcaacaattaaagaaaaatacattaaataataataataataataacacctctactataatgaatagtttgaataatatcaataatgaggatattatttctatggatttactcactccattaacttcctctccggctacttcaataactaatgctttgaagagtaataataatagtaataataataataataacaataataataatgtcaataacaataacagtgataatgatattgataataatactaatattactaataacaataacacttcaaataatactactgacaatattaataataataacaataataacaacacaacttcaaaattaactccaaattcattaactgaaagtccaacatctgctacaataataacttcaaatgatattaagggtccatcttcatcttcaacatcttcatcttcagctttttcagaattaactaatattaataatcaacttaatttagtaccttcaaatattgataataatacagtatcttcaatagatccaaaaactacttcattatcaacttcttcaaatcatttatattctcctacaaatttaggtatgaatattggtattgatatggatattaatatgaatcaaaattatgcttttgctgatttattagattttaaaaatgaaatgtcaaatgataatgatgttgataatgttcataataataatgttaatgataatgataatgatattacaatgaataatttagattttgatgttttgagagaattacaacaaattaatgattcaacaatgttaaatttaaatcatcttaatcataatatgaataccaataataataataataatatgagtatgaatgtatctgatgataaagaaattaaaactattaaaccactagatatcaaaatcaaatcagaaacttctgtttctttaaataatcaaaatataatatcaaataatgacacaaaaagtaagagtaccaataataacaataacaataataacactatcaataataacaccattaataacaatatgaatgaaatcaaatttgaaaaaatcaaaaaaccttcaactaaatcaaataatattgatataatatcgggtaaaaatattttatcttcaacacctcaacctaatgaattacaaactcaagcaagacaatcaaataaaaatgtttcatcatctgttccaactaaaattgcctcaaagcaaattttaacttgtaataattgtggtacaactaaaactcctctttggagaaaagatcctgatggaaatactctctgtaatgcttgtggtttatttttaaaattacatggtacaatgagaccattatctttgaaaactgatgtcatcaaaaagagaaattcaaagagacaatcaatgagttctcaaggtgaaggttataaaaatttatcgacattaacacaaaatcaattgaaaaatcaattacagaataataataacaatattaacaatatcacttctaataattcattacaaaatttacctgatttgataatagcttcacaatcatatcaatcaccaaaatcttattcattttttcctcaaagtgtaccaaattctcaaactttgaaaaataatagttcaatgtatcaaaatcaaattcagtttaaatcaaatgatcgacatatgaatcaatcatcaaatattccaattgcttctaaaattataaatataacctcaaataattcatcaacctctctttcacatttatcaaattcaaattcatcattatcacgttcgaaaaatgtaccaattttaccaaaaccttcaaaagattcttcatctcctggtactccaagaaattcatttaatgtaaattcatcaatttctcaacctcaagatataccacaattcaagagaagaagatctaaattaaatttatcaacatcacaaaattctcaaccatcatctccttcaactgctgtttcattttcaccttcatcatctgttgcatattctccaataaataatataacaaataatcaatcatcatcatatcattcacctgttaataatattaatccaagctcacctgctaatagtttatcaatgtttgggaaatcaaattcaagacataattcaatttcttcagcttcttcatataatttatatcaagatattaatacaaaacgtggattatcaagtaataatattgcacaattaaatacatataatttaacttcaaatctcacaaatggtataattaatttatcgaataataatatgaattcaccaaatagtccaggttccctacctaatcaatctccaaatggatttttcaataatagtaataatagcagtactgcaacaactaatggaagtaatacgattaataataacaataataatacattcaataataatactaataaatatccaatacagagagaacaaaagatttctaattttagtaatttaagtgcaggtataaatgctatacggaatactagtgcaagatcaagtttgagtaaatgtgttgctaatggtaattcaccattatcttcaacaaccattaaaaaatctaataaaccaacaccaaaattacaaaatgctgaattaaattcaactgataattctaataacactaatactaattctaatgatactaatactaatactaatgacaatggtggtgatgaaacaatgactgatttagactggctaaaatttgatatttaatttactaaaagataataataataataataatatatacacttttcacattttctacatacaactctatttttaattaaaatttcttacttaattaatgtttttctttaataactatacatttttataaatatcgttttctaatcaataatataagtatactaactctacagacctgtatagacattcttagtaaaccttacataatattttctactttctcgaattttccgtagtaattaatttgaatttgacatgttcaaaattttcaactgttagctgaacaataactctttaagtagacaatcgacaataatgtattacggtggtcgtggtggatataacaacaataataacaataacaatcgtgcaggatataattttccaaatggtccaagaggaggtaataataatatgaatacttttaattcaaatcctaattatgttacagttgaaattcaaggttggaataacgcatcaccacaagaagtaattagctttttaaatcgtaaaactagagttgaattgtttcttggaaatgttgttggtaatatagtacaagcacaagttaaaactatgaaagatgcagatataattgcaagatgttcaggtatgagatttgcaggtcaagcattacattgtcgaattgctaataataataacaataataataatcatcataataatagtatgaatggaggtggtaatcctgcagtaaatgcagctgttaaagatagtactattaccatattacgaaatttcttaatatcaagatataatcaacaaaataaaatgttagacttacaaagttgtgaaaatgatcaagttttagcaagtaatggattattttcaaattcttcaacatcatctaaattttttcctgcattaatgaaaattgcagaacaagaaaaacttgatgttgaatcagttaatttaagtggtaataatattaatgattattcaaaatggttaagtgatttatcacatagtttcccagatgtcaaaaatattgcaatggcaaataataatgtaaaaaagattgaattctttgataaattgaaaaataaattcaattcattaagagaattaattattcaaggtaatccaatttcacaaaatatgacattagttcaaaaaattgttgaatttttcccaagattagttataattgatggtaatcaagtaagagatgaacaaaagatcaatcgtattttaacattcccaatcaaatcaaccaaagtattttttgaaaatgaagatttttctaaaatttcaactactttcctaacatcatatttaaatttttgggataataatagagtagacttaatgtcattatacacaccacaatcacaattttcatatcaatgtgattcatcagttatttctgattttaatgcaaatacaccaactaatttatggaataattatacaccacattcaagaaatttcaagagagtttcaaatgaaaaatcgagatcgactagattatcaattggaccagaacaaattttaaatacttttaaatgtttaccaaagagtaaacataatttagatactaatcctaatgaatattcaattgaaactgtttcttttccaagtttaaatggtataatgatttcaatacatggagaatttgatgaaattgcacaacctgaacaacaatttgcagaaaattcaaataatgttaataatagatataataagtataataataaaaacaataaaggaggtagtttagaaaaaagatgttttgatagagttttcgttgttgtacctggacctaatggtgcattcatcgttgcaagtgatttattatgtgttaaacactattcaaagaagaagtcatggaatattgttgataataacagtacgaatattaataataatgcagcaattccagctgtacctacaccatcaattacacctgttaacaatggagttccaatgcaaccaatgaataattcaacaatcccaaatgcattaccaccagatattgcaagtaaattaaatataacacaacaagaaattgtaatgaaaataatgcaagagacaagattaaaattagaatttgttttaatgctttgtgaacaaagtaattgggattataacacagctggtataaattttacaaacagtaaagcacaaatcccacctgatgcatatttacaatgattgatagtcatactgttttgtattgtatataaattttatatgttaaatagatttaacaattatatagttataatgattaaatttaaaatgaaaatgaaaatgaaaaggggaaactttaaattgttaataataagttttgtacagtaagggtttcttcataaaaggttaggaaactagtcattgcttaatgttcattgctgattatagtaaacaatataaatggtattcagagaaagctgtaaggtattccccaacaattaactatcctgtaaaagaagataatatgattataggtaaggctaaaatgttgatgaatatttataattgtaatttccacaaaaactccgtaaccaatgttaactctgatacagataacagttgggatatttatccattattagaggctgggaagttaataaataaagaggaagttgaattaaaggttcaacttgagaaatgtagtaatgaaagtttttcactttgtagtttttatggtacagattcaagttgtgattctgaatttaaagaagatagtaagagtgatactaatgaaaaaacctttttgtattaattttgtacagtgtaataataaaagtgataaagtaagataataaaatcagttttgttaaataaatataggagtctataaaagatgagatgtagtaaattaatggacactaattaaaatatgaatcacacataatgttggcaatattaatacctgaaatagttaatattaaccaagtaataacaaataaaattactggagcaagtagatattcagttttctgtaagaatggtaaagcattataaccataaaatgttattaagaaataataagataatgcaatgaaatataatgaattaccaataattgttgaaaaaatattattcattgtaatcaatgggataaagaagaattgaataaaatatagacataaccatattattaaataagcattacaatgaacatcaaaacaatatgaccattctaaaattgaatcaaatactataaatttatgaataaaatttaagattgaattatttgataatgattcacccattatatgagcatctgattgtaataagaatttattagctaaaatccaaccaattgttgcaataattaaaccaaataggataaaatcgacaattaccatataaagaatcaattttaatatacctaaaacacctgaagtatacattaacccccaaaatattgctgaaattataagtaaaaagcataaaataagtacaaaacttggatcatctcttgaccatttattctttgtttgtttttgataatataatgatttataaacacgttttggactatgtaataaatttaacatttcccaaaatgcagtttcaaaatcaagagaattaaagattaacatacgtttaaaatatttaggtactttaaatcttgtatttaaattttctcgtattttctttaattgagaacgttttgattgtctttgagcataagttgaaacagatggtattgaaccttgatttgaactaatcattgaaaatctatcattttgagatgaatttgaaacattgggtaaatttttaggaatatcatccaaagttaaaggcagtattggattagagtcgtttctcttagacattgcggaaaggcagaattgactagttagctatggaatagtaagtaaatcaggataaaataagtaaaatcagataaataaaaccacatgtaaaccattcaaaatgaatttcatgcacatcatgtatccaagaactcaattaaattggagaaaaacaaaaaatacaaaaagggaagatgtcgcgggtggaagatataagtggaaatactgacggatattaaatgaaaattttatttaattttatttaatttatttacctcattagttatattttgcttattaataattaaaagtggttaaatatacttatcttttaatttattttcatttacttttatctctttctcttatcttcttatttccctttaatttactttattcttccgtaaatatctttcaaagagtaacaattatggtgcaatttgatttaggtgatctttttcccagtgaaagattattaatttcaaattatttactcgatatctataataacaccccatcttctgtagagatactgaaaaagggtaaaaaattagctccattaactcaatgtggttgttatgatggtgaaggttatactttagtatctcatctttctgatccttccccatgtctcttaaatggtatatttatgtcatttttatcaatttattgtattatttcatcttatttaacaataaagaaattaagatcttcgaaaaatatttcaacaaaggcttcaaatatttttatctttaaactgttaatgattgcttgccaaattttcattcaattagctattattatcgtatatgcaagttcaaatcattatgttgttcctggtgtctcaattttccaagattcaatctttttatcatcagttttaacattaatttcaattttcacttgtttcactttatcatatattgaaaattataaaacttatgttgcacaaactccactgattgtattttggttcttttccactattatcggttgtttgagaattgttaattcaattttaagaaattctacatcatttgaaattttcttaattgcttcattcacaatcttatcactcttgattctcattttcgaaattaattttggacctgttttgaacttagatccaacagaaactgttaatatttatgattattcaaatattttcagtagagtatcatttacttggatgactccattaatgcaaaaaggttatgaaaagttccttttacaatcagatttacctccattaccaaattttttgaaaactgatgttttagctaaaaatttagaacaacattggactcaacaaattaacatgtcttcaaatccttcactattgaaggctcttacctcctcatttggtggtccttattttgttgctggttgttttaaattcattcaagattgtattgcgtttatccaacctcaattattgaaaaatctgatcatctttgttaacgattattctcatgatacatctatcccattaactagaggttttatgattgtttctgctatgtttggtttatcagttcttcaaactgctgctttacatcaatattttgaaaaagtttatgatacatcgattaaagttaaatccgctcttacttcagttatttatcaaaaatctttgaaactatcaattgaagctaaaagtaatcaatcaactggtgatattgttaatttaatgtctgttgatactcaaagattacaagatctaattcaaaatttacaacttatttggtctggtcctttccaaattattctttgtttagtttcattatacagtttattaggtaatgctatgtggattggtgttttcattttagttattactgttccactaaatactacagttttcaaacatcaaaaaactttacaaaaatcacaaatgaaagttaaagacgaaagaactggtcttatctctgaaatgctgaataacattaaatccttaaaactttatgcttgggaaaatccttataaagaaaaactgacttatgttagaaatgaaaaggaattgaaaaatttgaagaaaattggtgctttccaagctttaaatcaatttatatttaattctgcacctttccttgttagttgttccacatttggttcattcatcatcttatataaagatcaacctttaacaactgatcttgtctttactgctttagcattattcaatttattaggtttcccgttaatgacattaccttggacaattggtaatattattgaatcacaagttgcattagatagattaaccaaattcttaattagtgatgagattgaagatgatgttgttaatagatatccacctgtggaaagaaatggtgatattgcagttaaaatcgataatgcagatttcctttggtcaagacaaccttataaaacagctttagttgatattgattacattgcaaagaaaggtgaattaagttgtattttaggtaaagttgggtcaggtaaatccgcattaattcaagccttacttggtggtttacatagaactaagggtaatgctagtgttgcaggtactgttgcttatgttccacaaactgcatggattatgaatggtacaattaaagaaaatattttatttggttgtaaatatgatgaagaattttatcaaaaaactttaagtgcttgtgctttattatctgatcttgaaattttaactgatggtgatgcaactcaagttggtgaaaagggtattagtttatcaggtggtcaaaaggcaagattatcattagctagagctgtttattcaagagctgatatttatcttatggatgatgttttaagtgcagttgatgaacatgttggtaaacatattagtaaaaatgttttaggtccaaatggtttattaaagagtaaatgtaagattttagcaactaatagtatggcagttttaagatattcagatcatatttcacttatggttgatggtagaattgttgaacaaggtacatatgaaagtattaaagttgataataaaacaccgttattattaaagacagttactgaatatggtcgtaaatcaaattcaaaagattcatctgatagtgcaactactgcagttgatgaaactaatgaaccaaaatcttcaatttcaatggaattgtcaacagaaccttcaagttctgtaactttaatggatgatgttaaaaatgctaaggctgattatccaaaggctgaaatggaagatttcaaaacagatattattaatcaagaaaatattcaagcaaatgctggtagatctgaaaaacatgaacaaggtagtgttagttgggatatttatatgacatatgcaaaagcttgtggttttaaaaatgttatctttttaattagtttaattgttttagcaatggttctttcagttacttcaaatgtttggttaaaatattggtctgaaattaatactagagtaggttcaaatcctgaaccttggaaatatttaggtgtttatttcttattctgtttatctggtgttactgttacagtttgtacatcattagttcaatggttattatgttcaatttctggttccaaatatatgcatgaaattatgttagcatcagttttaagagctccaatgcaattttttgaaacaactccaattggtagaattttaaatagattctcaaatgatatttataagattgatgaaacattatttagagttttctcaatgttctttggtagttcaattagagttacgtttacaatctttgttattatttattcaacatggcaatttgttttctttgttgttccaatgtttttcatttatagatactatcaaagatattatttatatacatcaagagaattaaagagattagaatcagtttcaaaatcaccaatttttgcacatttccaagaaactttgacaggtgtttcaattattaaagcatatgatcaagttgatagatttgaatttttaaaccaatataaaatggatgttaatatgagtgcatatcatccatcagttacagcaaatagatggttagcagttagattagaattattgggatcatttattattttaggttcatcaggtttattaattttaacattaagatcaggtaaagttacaccaggtttggttggtttatcagtttcatacgcactgcaagttacacaagcattaaattggattgttagaatgacagttgatattgaatcaaatattgtttcagttgaaagagttatggaatatgcaagtttaccacatgaagcacctgaaattattgaaaataagagaccatcaactaattggccatttaatggtgaaattgaatttaaaaattattcaactaaatacagacccgaattagaatatgttttaaaagatattaatttatcaattaataaaaaggaaaaaattggtattgttggtagaactggtgcaggtaaatcatcattgacattagcaattttccgtataattgaagcatataatggtaatattgatattgataatgttaatacaagtgaaattggtttatttgatttaagatctaaattatcgattattccacaagattcacaaattttcaaaggtaccattagatctaatttagatccaattgatcaatatgaggatgaagatttatgggcagcattaaaattatcacatttagattcacatgttaagaaaatgtatgaagaatatgaaaataaggaagaaattggatttaatggattaaatgttgcactaagtgaaggtggatctaatttatcagcaggtcaaagacaattgatgtgtttagcaagagcattaatcaaaaagaattgtaaagttttaattttagatgaagcaactgctaatgttgatgttgatactgattcaattgttcaagaaactattagaactgcatttgaagatagaacaattttaacaattgcacatagattgaataccattattgatagtgatagaattattgttcttgaacaaggtagaattaaagagttcgatactcctgctaatttattaaagaagaaagattctctattctatgcattatgttcagaaggtggtttaattgataatgaatagagaaattgtatttccccattataattattataaaacatttaaatttaaaaaaaaagttactaattaattagtttatcatacattcttttcgtttttttagttatttagataaaagacttatatatccacatatccaaataactattagtatttataaaacttcccagtagtttgtatatgtatttcaatgaatattattgattatatatactatgattatttgttattacgtctcatgaaaaagctggcaataccaactgtagctgcaactgcagaactgattattgcaaaaccaatcaaactatcctttgcaagttcattttctatcatttttttcaattttattgcatttgtattctctggttgatatgttaataatgtatcaatatatcttgtagcttcttgatattctttaattttaaaacatgcaagtgataaataatatatacattcagttctcctacttggcgtcgttttaaatatttctgttattatattaattcctgtcttgacatcatcattatcatttgactttataagcccccaaccataattaaattgactttgagttgttgcaacgggctgttcggattccacttgggcctcaagaatggccaattgttcctcacttagtgggataaaaccttcctgtggtgatggaaactcgttaaacttcttcatagatgcagacattacttatttgattacttcacagagtgatatcttaacctatcctatccaatccagtccaatttactgataaacagagaaacccctcaaaaggttaaagtaatcaaataatttttttttgttgatgtttcaattttgacggtttttttttattacttgatttgatttaaagtgtcttttcttatcttttgttttcttatctttgatgtattaatttattgtatgtgtttattttgatttgagtttatattcttcttctttcttcaattaacaatgtcttctcttaaaaaacaaccagtgaaacaagcaactagattgatggctgcaaccgcaaactgttcagaactatcaatcgcttatggtaaatgtattgcaagtaagtatcaaaatatgtccaaggatgcttgtttaaaggaattcatcagcttcaaaacctgtgttcaacaacaattagctagaaaggtatgattcaacaaattacatttctttttataatttatttttaatgacatacacttatttcttctacattattcttatggtttggtaatcggggtatattaccaattttattttttactttgagttcgtttccactatatatataatatacaaatacacttattataactaatatcttacagtaatcttcgaataatataattgtattaaaataaaacaaaaaatgtttataaatttgttagtataatcaagtataatttacaaaatgttactactgcacgttctaacttcaaacttaattaaacaagagttttaaattctctctttaatctcttaaacttttgttactcttagttcctttcacaaatctcttgattaatttagcaataatatcaaagaagtacttatcccctaagtataaacttattaaattaacaaaagcaccaacaaataaccacaatttaacttcaaaactcatccatgttaaatccattaaatctccaaaattagaggatggatcaactgtcatcaatccgacagatattgaaagctcaataataatagttataataaatggataattcttagtaacttcctctctgtatggtggaccagctgttaaaattaatgcaattaaaatatattgaaaatttgaaaagaaaaataataatgtattatcggtactttgaacttgatcatcagttcctggaattggttcaatataccatgggaaattttgtgatttaacaactttccatgctataaattgtcccagtaaaagtaatacaatattacctaataatggaataataatctttggggatattaaattagctgttggtttcttagtgacaattttatcatatggttttgaccatgacataaaaacagctattggtataattaaaaataaatcaatataaaggaattggaaatctccaagatttgatccttccttgtacaacaaagtaactgaaataaattggattgctgaatataatgacatatattggaaacatgaaaaactagtaactaacgatgatctaccttctttgataatatctaaaacacatgaaatttcaaaaacatgtgatgtaaatggagctgcaactgatgcttcagcttcacttaatgaaacaccgacatctgctgcctttaatgcaccacaatcatttgcaccatcaccgcaaaatccaactgtataatcaattttttgtaactgattgacaagttcatgtttctcatctggtgacattcttgcaaaaattgaacatttcattaaaatcatttcaataaaatattccatatctactaattctgttaaaataaatttgaaaacatcacctgtaattgctaaacaataattatcatcttgatttatatctaatggtgataatgtaactctatctaactgtaaatcaggattatcaacttctgaccaaataataggtggtatatgtgtattgctaaatctgccttcaatttcattaccatctgcatccagataattatttggaaaactttcataatcaaatgttgggataaaaactttagaatttggtttgataatcttacattctctaccaacactaactgctgttaagatattatcacctgtacacataacagttcttaaatctgcatttgttaattgttcaattgtatccgtagtagaatctttcaacttattctcgaaaacaataaaaccgataaattctagatctttttcaatatcatctcttttcaaatcaccaacaaatgataaatcagttggattcttagttggattttttaacttcttagcagcacacgcaatgattctataaccattatgtgtgtaattgtataacaattcattgaagttatcaggaatactatctggtgtacaaatagtttcaataacttctggggcacctttaacaaaaacatttaattcgtcttcatcatagtttgttgtaccagtatttgatttcaaacaaattactgacattcttctcaattgtgaaataaactcaaattctttcagttgaacataataatcagaaacattattctttgtaaataaaatcggttgtgccaatgttaataattttctagaatctaaaaagtttgataatattacactttcatttctatcctcaatcatatcccatccaacaaattcaaacatattttcatctaatggatcaccaactggtttatcgttaattttctttagtgaatgacatgataacattgatgcgaatattttatctgaattaacgactccactattttcaatatcattagatttcttgaacatatcagtaaattcgtgaacttttctatcatggattggtttagagatatgaatacccataatatctaatgattcttcagttaatgtaccagttttatcaaaacataaaacatcaagtttaccaccaatattaactctcattggtgcaatacagaaaatcttactttgacgtaatctggtcaatgcaaaattagttccaattgttaaagttgcaggtaatgcagggggaacaacaatagtaattaaatccaatgctcttaagataataactgaccaatccaatcctaatttaataaaattaattgttgaaaatatgaaaccgatacatgcaattcctgtcatgacaccaatatacttgaatgaatcttcgtaaaatttaaatccagatggtttagggaataacattgatctaacaagagcaccttttgtagtattgaatcctgttctcactacaagtgcggttgctggatcattaccattaccatcttcagaaacaccatatctaactctaacaattttagtaccattatataaaaacgattttgaaaatttatttgaaaattttgtatcattaaactcagcttcaatatccttaaccgattctgaagaaattgaaattttagaaactggaacagattcacctgtaagcattgcttcattaacaattgcatcacctgataataaaagagaatcacatgggaaaacagttaatgaaggatcagaaacttcataaatatcacccggaactaaatcatctgaacaaatttctttccaaaatccacttctccaaactctaacatcacattgaaatcttgacatttttctcattctttttaaagcggatcttgtttcaattaatgattcagtgatggagaaaacagatataaggaaaatacagaatgcataataataatagttatctgctaaccataaaaaaattgaaaatatttggaaaacataaaatggatgtaaaatttcatccattaataatttagagattgatttttcaacaatattgattatattatcaccaaaaatcatttttcttagtttataattagtttcagtgataccgtctttaatatcaggataatgacaccacttctcgtcaatccaattagttggcaatttaaataaatcatccagtggatcataaaataatttcatataacgatattcaaatgagattaaaataggaacaatagggtctatatcatcaatagtatatgttttattactcattcctgttcttctactggtatatgatttagtatcaatattgttatcaatattattattattatcagtgttactattattatcgttatttacttcttcatcatccagtgattccacttttttaggtaataagaatgtactcatatttctattataccattttctatcaacagttggcatttctaaaagtccatattcatcttcaacaactaaccattcagccttagctaatggaacttcaacacccattagttttattcgccatcttggaatccatctgaaaattaacgcagctaaaccaaaagttgaaatacataagatatagtataatataagttttgaccaagttgtttgataacctgcaataccaacgactaaatcttcttcagcaatataaaatcgttgatttttattctttgcaggaaattttttaaagaataaatcatgtaatttcagtgattctctctttttcattgttttctcccattcctttttagttatcatatcttcataaccttcataatcttcatcgccttcttcgccgtaaatatgtaaatcttgttcttcatcagctatcaattcacgttctgcatcacctctgaaaaattcactgtaaggattttcatttatactaccataagaattatctgaattattacctgacgcattatcatcattaactaatttagattttgaagttggaaaactttgttgatcataattttcatcaattgaataagcatcactgggataatcatcagcaaatgaattccaatttgtatcataatcaattttaacattctctaaatgattattcattcttgaagatacacccttcgctgattcgatatcttcagttttaaaaaatctaaaattagacctttcatgtaaatcatttgattcagattcatatccatcaaatgctaaattttcatcattttcaaatgatgttaaatcatttaaactttttttatgattaatattttcaaatgtatttattgaatcactatctagcattaattgatcaacatttggagtatcgatattttgactaattaccgaaggtgatcttaaatgactatgatgatgaaatgatgaaattgaacttggaacaacatttgatgcagcccctgaaaacatttcggtattattttcatctaagtgattcaaattattagaattcaaatatctattagttgaactagatctacttgatctacctgacgtcattgaatctctatgtcttgaaataccaatactatgatgttgttgattggattggtaggaggtagaaaccaatgaaggatctgaatgatcgaactcaaaattattattattattatgagatcgtttcggcattgataataatcacacaacttataacaggctttctttagtataattacaatacaatagaatgtcaacaggtataataattccaagataagaaacttccattaatcgataatataacctgaaatcttttctacagtgtaaaatttttagttattaaccgcggtcatagaatttttatctaaaaaaaaagaatacagtacaagataagaatcttaatattatatgaacaaatgagttaatagttatatacggagttatagaataaagagagaatgtagggtagtatacaataaacaaaataaaataaaaaaaaatgaaataagaattttcaacatctaaccagtagattaataacaagaaatgaaagtttatctatgaatgaatgtaatctatctctgaatggtataatattaaaattttaactgtgatttgatatatttaaatttgaaaataattccctctaaaccaacacatatgttcaattagaatgtcagcataatctaaatgatgtcattctagcaaaaaaaatgaaaaaaaaaaagaaaaaatgtaaaaaaaataaaaaaattggaaaaaatgtaaaccataaaagaaaaaaaacacaaccttgaagtaaaacttgaaaataaaataaagatacccaccttgaataaaaaagtacatgaaataaaaaaaatgaattgaatatgaatatgaaaataaaaataattatgagaatgaataatttcagatataataatatatttaaaacaaacattaaaatgaatgaatttcttgtcatgtttgaatttaaattagaattaacactgaaatttgcaacaaaaataaagatgaaatgttaatatgaaaatgaatatgaatttaaagttgaataaaaagaaaatttaagcaattatgaagtgaagaaaagcataacagcaatcattaatggtcatgaataatattgagttaccgtccagttattttcttaaaaaagaaggttttggtaatgtaacagccttaggttcagcatggaatgaggaacctgcatatttgaaatcattagtagaacttgaactgtaagatgatgaactcataggttttgatcttgtagtagaagattcagaactagaactagaacttgaacttctagataaaactggaggtctggtattaaaatctggagttgaaccatctggtaatcttggtctattaaatgaaccagtatgaacagaatttgatttttgtaaaggttcggaagagactggagattctgaaatgattaaatttttcaaatcttgagttgaatctctaatttcatctgaaatacttttcaaagtagctctctttgttccaccaaaatcgacttccacacttcttggaggaatgacaattctattgttatctctcttattgttattattattattattattattattcttagccttgttgttcttactagtacaagtctttttggaagtactatctttgctattgttgttattattattattagttttctttgaagcactgttattattattgttattattattgttaccctttttagagtttggattttgattttgattactctgttggggttgcttctttatattttgtaaaggctttggttgtctttgagtttttgtttgtttttttgaaggattagatttattattagatttagatgaatcaaaattctgtttattcattttagaagacatttgtccatgagacattggaatagcatgtatagattctgcaaccatcatcatagtaaatgtgatattagtcttgtaagatgtttagtagttattaaagtgtaaggtagtccttgcagaagaagagataagaagataagaagaataaaggaaagaagaagtagagataaagaaataagaaaagaaattgactcgtatataccttaatactaatactaattaaaaaaattggattttgccactatattgagaatcgcaaaagattatgatgacccattttctgtgattatgcgacactgtgtttgttgtatggtttgcttcttttcgtactattggttgtttattgtatgagtaatggaaggtattgttattttgatgcatgtagaattggctgtattgtctatggggtaagtttaacactgattactaagctttcctgtagtaaaatttatgaaattgtaaataatcttaaggaaggacaacaattttttaaaaaattttaacactaaaacaaccattacaaaactaaaaactcctttttttaacttttaaacactatagactgctatatatgtctcaaagattaaaccgattcatcactacaagttatccatacacaaatacacaacaaataacacaaatacaacaagcatcgatattcaacaaagagcctacagtaagatgagccacccctatcaaaataagatgaaaaaaaataacattacgtaataatattcatttgaaattttttttctttctacaatctctaagaaaaaaaaatttatcaaatttaatttgatttatttcagctgttaaactgccactttaaatagacaagcaatcaacaatggattcccaacaatctaataaatctcatagagggagttccaggaaaagtactgctaaacaaaagttacattctcaaggtaagaatgttaaagcttttgcttttgcaaaacctggtaaattacaacgtcaagcaacaagaagtagtgatttaggtgaaaaaagatttcatgttccaatggttgatcgtacacctgaggatgatcctcctcctgtcattgttgcagttgttggtcctccaggtactggtaaaactacccttattagatcattaattcgtcgtttaagtaaaacaactataagtgatattaaaggtccaattacagtcgttagtggtaaaagaagaagattaacatttattgaatgttcaaatgatcttaattcaatgattgatattgctaaaattgcagatttagtcttacttttaatggacggtaattttggttttgaaatggaaacaatggaatttttaaatattgctcaacatcatggtatgccaagagttttaggtattacaactcatttagatttatttaaaaaacctgcaactatgagagctgcaaagaaaaaattaaaacaaagattttggactgaagtttatcaaggtgcaaaattattttatttatcaggtgttataaatggtagataccctgatagagaaattttaaatttatcaagatttatatcagttatgaaatttagacctttgaaatggagaaatgaacatccttatttattagctgatagattagtcgatttaactcatccttctaaaattgaacaaaattcaaaatgtgatagaaaagttgctctttatggttatctacatggtactccattagcaaatgaaaatgcaagagttcatttagctggtgttggtgattttactgtttcttcagtggaaaaaatacctgatccttgtccaactccttattttgaacaaaaattagaggatttcgaaagagaacaaagaaaaattgctgaagcaaatggtgaagaaattcctgttaaaactcatagacgtagaaagagattagaagataaacaaaaaatcatttatgctccaatgtctgatgttcatggtgttttaattgataaagatgcagtttatgtcaatgttggtcaaaaagcttttaaatccgaagaagatatgggtggtattggtgaaaaattagttgctgatttacaaaatgctgctgatgtcttagattcaagaaaatcctctggtttgaaattattcagcgatggtcctgaaattaaagctgttaatggtcaatttaatcatgatgaagatgaagatgatgaagaagaagaaattgttgctgaaggtgatgaagagtttgaaggtaatactggtagacatcaattaagaaatgcaagaatacataaacaagctatctctgaaatcaatgaagatgatggagatgatgaagatcttgaaaaagatcattttgatgaagatgcagatgatagagcaagagaattaaaacttaaacaattaaagaaaacttccaaaacttcaacagaagaaaagttacaatttgaaactgattcagaattagaggatgaagatgattatgaagaaaatgataaaagttctaaatggcaacttatgggtggtaaattaaataatattcaagttaagaaaacttgggatataaataaattaatttacatgaataatatcgaaccaaaagatgttatatcaagatggagacaagaagatgatttagatgaagaaaatatggaaccatcagatgaagacgaagaagaagatttcttcaccaaaaaggaagagaaaaatatccaagaagttaatgataaggctaaattatcattagaacaattgaaggaaaaatggtcatctgatagtaattcattattaaaattaaagaaaagatttttcctatctgctaaacaaagaattcaattagaaaaagatgcagcagcaggaaaaatcagtgaaaatggtgatgatgatgaagttttcggagattttgaagatctagaaaatgaagatggtgaagatggcgaaggaaatgatgaagatgctgatgatggagaggaatctgacaaggatgatttcactaattttgaagaagaagagatgaaggatgaaatgggaattggtaccgaagttgatgaagattccgatgatgaagaagatactggtgatttaagtgttgataaacagagagctttaaatgcaaagaagaaggagaaattaaaacaacaatttgaagaagaagaagaatataagggagatgatgatccatttaatgaacatgataattggtatgaattccaaaaagcaaagatggcaaaacaattagaaattaataaagcagaattgtgtaaacttgatgaagaagcacgtaaaaagattgaaggttatcaagctggtgcatatgttaaaataacatttgattcattaccaatggagtttgttgaaaattttgatccaacattcccaattattgttggtggtttattgagtactgaagaaagatttggttttatgaatggtagaattagaagacatagatggcataaaaatattcttaaatctaatgatccattaattttatcattaggttggagaagatttcaaacattaccaatttataccacatctgattcaagaacaagaaatagaatgcttaaatatacaccagaacattcatattgttttacaacattttatggtccgttagtcgcaccaaatactacattttgtggtattcaagttgttgataaagatcatacaactggatcttttagaattgcagctacaggtgttgttgaagatttaaatgctgaaagtacaattgtcaaaaaattaaaattagttggttatccggcaaaaattttccgtaatacagcatttattaaagatatgtttacatcagctatggaagttgctaaatttgaaggtgcatcaattaagacagtttcaggtattagaggtgaaattaaacgtgcattatcaagtcctgaaggtcattttagagcaacatttgaagatagaattttaatgagtgatattatttcattaagaacatggtatcctgttaaaccaaagaaattttataatcctgttacatcattattattaaaggataaagataattggaaaggtatgagattaactggtgaagttagagcagttaatggagttgcaacaccaagtgagaaagattctaattataagaagattgaaagacaagaaagaaaattccatgatttgaaagttccaacatcaattaaaaagaatttaccatttaaatcacaaattcaagaattaaagaaacaaaagaagaagacctatgttcaaaagagagcagttgttatggatagtgaagaaaagaaggctagaaaattaattcaaactattcaaactattaagaatgataaggaaagtatgagaagagctaagaaaacttcaaagatggaagaaaagattaaagctcgtgaaaaggttgaacaatttaaattggagagaacaaaggaaaagaagaaggaatattttgaaactcatggtaaaaaacgtaagttacaatcaagtgaaggatcaagttcagcatttggtagtaaaagaagatagatggtgtctttaataaagctttattataaacttgtataattaaatttctatttctataatatattatgtagacaaaacattgttattattactattaaaattatatttgcggaaatgtttagttataatataaaaatacataaaaaactattaatctgtcataatatacgaattgagttataggtaatgattagatgaattgggataaccatttaaaaccttcagcataaccttgtctcataacaatagaacacatgaataattctaaaggtctaacaccagctgggacactaccaactctaccagtagtttgtaataaacctaaataatttctaacttcattttcactaacagctcttggagaatcgattttattacctaagataaggaaaggaaccgattttaattcttgcatatttaataaagcatctaattctaattttgattcttcaaatctttcaggatctgcaacatcaactaaatatacgataccattaacttcagggaaataatctttccataatcttctagcttgttgatgaccacctaaatcaaaagttgtaaatctaacattaccaattgataattcttcagatgttggatgtaaagttggttgtaaagttgccattctatcatttttcaacatatgtaaaagggttgtcttacctgcattatctaatccaagaaataataatttagcatgtttattccataaacctaaatatgcaagagcgtcttgaaaccagtcaaaaatccacattttaatcagttacttataggatgattatagatatacaatttcaataaaataaagcaatctccttccttatattttgccattggaagaatcatgctctcactttaatgttcaaaatcacccattcaaaatttaaagattataataccaccatccgtcccatcgaccgcatcttttttatttttttaaagtcgctcctctcgcccaaaggcgacatgtgtctttctttcaaaattctttgtttgtttgaatcagtgttgctggtgaaggcactgtgtatatatgctcagctttggatatctctgattatttctctgcctccattgatcttcatctcatttaatatcaccatatgaaacttaacatcaaggtatgtaccatatagttacattgtcacattttttccaatctttaatgatcattgaaatactaacatttccatatttcctattttttttgatttctattattatcacagcaagtattaacttcgagatcagatcgtgtaaagggaattgatttccatccaactgaaccttgggttttaacaactttatatagtggtaaagttgaaatttggtcatatgattctaaaactttagttaaatcaattgatgttacaaatgtacctgttagagcaggtaaatttattgctcgtaaaaattggattgttgtaggtgctgatgatttccaaattagaatttataattataatacaggtgaaaaagttgctcaatttgaagctcatcctgattatattagatcaattgcagttcatccttcaaaaccttatattttaacttcatctgatgattatacaattaaattatggaattgggaaaataattggaaattagaacaagtttttgaaggtcatcaacattatgttatgtcaatttcctttaatccaaaggatactaatacttttgcatctgcttgtttagataaaactgttaaaatttggtcattaggttcaagtgtacctaattttactttaaatgctcctgaatcaaaaggttttaattatgttgattattatcctcatggtgataaaccttatttattaacttcatccgatgataagtcaattaaaatttgggattatcaaactaaatcttgtgttgcttcacttgatggtcatatatcaaatgtttcatttgctgttttccattcagaattacctttaattatttcaggttctgaagattcaactataaaaatttggaatagtaatacttataaattagagaaaactcttaattatagattagagagagcttggtgtatctcaacaaagaaaaattcttcattagttgcaattggttttgatgcaggtaacgttattattcaattaggtgatgataaacctttattatcaatggatcaatcaggtaaaattatatattgtaaacataatgaagtttatcattcagttattaaaaattcagattctaaagctgaagatggtgaaattttaagtttatctaaaaaggaatttggttcagttgaagttttcccaaattctttaaatcattcaccaaatggtagatttgtttcagttacaggtgatgatgaatatatcatctatacttcattagcttggagaaataaaatttatggtcaagcattagattttgtttggggccaagattcaaattattatgcaattagagaatcaaaatcaagtattaaaatctttaaaaattttaatgaaaaaccaaatggtcaaatcaatttaatttatgaagctgataaaatatttggtggttcattattagcagtcaaatcaaacgattcattatcattttacgattgggaatctggttcaattgttagaacaatctctgtcgatgcagaaaatgtttattggaatgatgatggtgatttagttttgatttcttcaaatgattcagtttatgcgttatcttttaacagagaaattttccaagatcatttatcaaatgattcaattgaccctgaagaaggtgttgaagaatcatttgatgttgcatatgaagttgatgatcaaattttaacaggtaaatggataggtaacgttttcatttatacatcaaattcaaatagattaaattatttagttggtggatcaatctataatttagcacattttgataaatcaatgtttttattaggttatttatcaagagataataaagtttatgtttcagataaagattttaatgtttcatcatattatttatcattatcagttttagaatatcaaacagttgtaatgagaggtgatttagaacttgcagattcaatattagaaaaaattgatgaaagagatataaataaaattgcaagatttttagaagaacaaggttatactgaaaaggcattagaaatttctaatgataatgatcaaaaatttgatttagcaattcaatcattacaattagaattagcattaaatatcgctaaaaaggataatagtcttcataaatggaaaaaattaggtgatacagcattaaataattggaaatttgatttagcaattgaatcatttgagaatagcaaagattatcaatcattattattattatatacatcatttaataatattgaaggattgaagaaattaagtcaatcatgtatagaaacaggtaaatataattcagcatttgctgcatcatgggctgcaaaggatttaaatacatgtattgaaattttaaagaaaacaaatagatttacagaagcatcatttttcagtttaatttataatagtgatattaagaaagttgatgaaattacaaaactttggaaggataatttaagtttagaagataacggtaaagttagcgatagaattttattaccaagtgtaaatcctgaatcattcccaacattaaaggaaattaatgattcactcattgatattgaaactacagaagaattacccgaagaagaatctgctgatgtcgtaaaaaaagacgatgaagaagaagaagaaaaatttgaggaagctgaagaagcaaatataatagagtctaatgaaacggctcatgaaggtaccgaggaatcaccggtagaagaggtcaacgaagtcgatgatgatgaataaataaaagagttcaaaataacaagaataaccctctaacgtttaaatttgtaacctttatcataaataactgttttataatactttaaatctacattatcgtatacatcttacagacatggttataataaaagattttacaatgctacatgagaaaaccttattttttcatcgcatcaccaataatttactaaccagtatggtggaaaattatcaactccgaaaccatgttggttacgattttaaattaattcccccctattttattcattattttgacgtactacgttaattattattattttaactgtcaaacaattaatttatctaaattaccgtattattcatagaaatattttcaccctgcatctatttgttgaaataactataaaagatgtgattatcctcttattttgctaccatttctaatttacttattttatatttcttttgctttattttctttattcagacaaagacaaaacagttaactaattatcaaatatgcctgattggtcacaattcccagatccagataatgtttcattaactaatgaggatgtcccagattttttcaaaatctgtgttattcaaggtgtcgcagatgcaggtgcatcattcactggtggtacagctactagaattggttcaattttcgttatttttgttgtttcaacatttgttacagttttaccattattaacacaaagatttaattggaaactatcaaaatggttttatttatttgctaaatttttcggtgcaggtgttattttagcaactgcttttgttcatttaatggatcctgcttatggtgaaattggtggtgatacttgtgttggtatgactggtaattgggcaagttactcatgggttcctgcattgattttagcttcaatttccgttactttcttaactgaattattctcagaagtttgggttgaacgtaaatatggttatgttcctgaagaacctgatgttcaaaaacttttaactgaaaaaataaatgaaattaataacgataatgataatgctgaagaaaatgatggtgctgtttctgatttaaataaaaatgatgaatttgctgttgatcaaaaatctttaacttctgaactttctagatatgaatttaaaacacaattttctgctttccttatcttagaatttggtgttatcttccactctgttattattggtttgaatttaggttcaactgattatgatgaatttaaaactttatatgttgtcttagttttccatcaatcatttgaaggtttaggtattggtgctagattatctgcaattccatggccaaaggataaacctgaatttttgaaatatttattatgttttgcttatggtattgtcactccaatctcaattgcaattggtattggtgtcagaactacttatgcatcaaattcttttactgctaatattgtctctggtgttttagattctttatcttcaggtattttaatttatacttcattagttgaatttattgcaagagattttatcttcaataaagaaatcaaaacaaaaacaactgatttaatgtttagtttagtcagtttattccttggtgctggtattatggcattagttggtaaatgggcttaatcttgcctacaatatttttatatacaaaacactttttttataatcaactctccccctttttacacgttttaactatatttagttaattaattaatctaatttaatatttaatatttcactaattcatcaaaatgtctctatattgattatttatcttaaaaaaaagaaagaagttaaataattaaatttttaaatattatctaatttgcaaataacctaactttatcaatttcataatctcttttatgtaaagccacaaaataacattctcttgattctaatctacatgcctttggtttaaatctatgaacttttttgaaaacttttaataatcgtttctcaaataatttatcttcttcaccagtgaaaaatttaacaacaaatgaaccattctttttaagtaaatcaatcgcagtaattaaagcagcatcacaaagatccattgacattgtatgatctttaaatgctaaacctgttgtgtttgccatcctaaaatatggattgttagtagtcttacttcgaaatgcgatagctggttgaataaatggtacatacatgtcacttaacacaacatcgacagggtatttattttctattttatcattatcattaatatcattaggattttcattttcattatcattatcaatattgtcattaatatttaattttttagttaataaactaagttccgcctctttttcaataattgaaacatctgaattaattaaagttttatcacttgtatcattatttgaaactatttcaacatcatcaaatattttattctttttttcaagagctgataatttaaagaaatttttaatttgtaaatgagtacctttacttaaaatattaccttgtaaggcagaagcaccatttggtggttgataaggtaatatatcaacacctaaaattttagaattttttgaacatctctctaatgcaacttgattccaagcaccaggagcagcacctaaatctaaaacatttaatgatttaccattatttgaagatttattgaaaatatgaaatttttcatcaatttgtaataatttaaaagcagctcttgattttaaattttcagcctttgctctacgagtataaaaatcactattttgtctattaagccaacgatttgatgatgatgaatttgataatagtgaaattgatgttgaaaaatttctaatattcattaatatagatgatttaagtacattaatatgtcgactcattggtggtatatgattgtattatgatgataaatttgaataagtactactgaagtgttatgttacgtgttattgggtataaattctatacttattgataataaaccagagattgtttacctgtaattttgatgtgttaagattgtctcatgtaatgaaaataaatgaataaaattggtaccaagcctccaaaccacgtgcagcaaaagaggtctcaaaaaagtgagaaaaaccctcacacagagaagaagaatttttcttcaattttcaaattttattttcttacagtgcgaatatctcttgttatcttattattaaagatagatagacagtatctgtacaggaaaacttttcatttagtttattcaattatatttgattttttacttctcttcttttagtatcgtcgaaaaaacctttaccggattacctattctagggagactatcatatattaattaatcatgtctaagattaacactactcaagttagagaaaacgtccaaaatttattaaaatactccaacgaaactaagaagagaaacttcttagaaactgttgaattacaagttggtttaaagaactatgatcctcaaagagataagcgtttctctggtactttaagattaccaaatgttccaagaccaaacatgaccatctgtatttttggtgatgcttttgatgttgatagagcaaagggtttaggttgtgatgctatgtcagttgatgatttaaagaaattaaacaagaacaagaaattaattaaaaaattagcaaagaaatataacgctttcattgcttctgaaactttaattaaacaagttccaagattattaggtcctcaattatctaaagctggtaagttcccaactccagtttctcactctgatgatttatacgcaaaggttactgatcaaagatctaccattaaattccaattaaagaaggtcttatgtttagcagttgctgttggtcacgttgaaatggaagaagatgttttagtttcccaaattatgatgtcaattaacttcttagtttctttattaaagaagaactggcaaaacgttggttccttagttattaaatcttctatgggtccagctttcagattatactaaacgccttgacagtttcattcattaaatttttataagttatatcaaatttatataagtaatttaagtttcagtgtttattataaaaacatatccgtattgtaaaaaaaataaaggtgttcttataaaattatttttattttcatgaaagtttacaatttcccttatttactatcacaatttcatcctgtaagcaatgagatattatggaatataatactattaacttagactctgatgatgaacctccacaattcataaacacaacttctaaggaacctcaaagagtatctgaaacaattgaaatattgtccgataatacaacagatttaagtgatgtagatgatgaagtatttaatgttcaaatacccaataaaactataaacccagtattcaataatgatacacatactaaccaaatcaaattagataatacaattgatgaacctgaattaacaccacaacaattgatgcgtaagaaactggcagaagcagcagaaagaagattgaaacctacatctaacgatcatcaaccaactcatgaagtaaatgatgaaccgattaaacaagaaaaacgtaaagaatacaacgaattagaagatagagacgaagctgatatggtattgctcaacgatacaatgccaaatattaaaagagttcaaacaaaacctataaaacgagttgaatcattcacaattgatgacgatgatgatgatgatgatgatgatgatatcaattgggacgatgatccaataattcaaccacccccaaataaaaacacatacatgccaaataaaagcactcaaaccacacaaacacataacaaaaataacttactcaatacaagtaaagctgacagcacttcaagaatacgaatgattgcaaatcctacatactgtaaggaatttaaagttaatggagatgttgatgcagtttcattaaatgatttagtgggttcaaaaggattaattaaaacatatcaatttaatatgttaattgattttgattatcttgcaagttttgttaataataaaaattgtgaatatgttttgatttgcaaaaacgatggagatcatttacatattcaaccttcatcatataataattataatgttaaagttattgatgttactgaaaatttacctaaattcggaactcatcataccaaaatgatggttaatttttatgatgataaaacatgtcaaattgttgttcatacaatgaatatgacacaagctgatcatttaattcaaactcaaatgtgttgggtatcacctgttttgaaaatgcatactgatcgaaaaaaatatttagatttcaatactagcaatatatcaataaagaaagatacaggcacagtttttaaaagagatttcattgcatatttattaacttataaaaaagaaggtgttaatgatctaattaatgaaattggtaaatatgattttacaccaattgatgttgtatttgttgcgtcatccccaggtaattatcattatgaaaattgggaaacattaacaagagttaatgcaaagccaatgtttggatatggtagattatggcaagtaattcatacattaggattacaatgtttacatgggaaatttattggacaagcatcaacaattgcaggaccatgtgatagttggaaacgtaatttatttgtttatttattaacatcatgtgttgaaaaaggtttcccattaattaaaaaggctgattattcatttgaaccatatatgagaacaatgaataaagttgaaccaatacttatatggccaacaattgatgaagttttaaaatctagatcaagtatgtattcaggaattgcattacatctgaaaacagttgataaatgggaagcatatgagagacaatatcttgatataaggaaatatttacataaatggacaactaatagtgatactccatataagagtaaagcaggtagatcgaatttatcatcacatactaaaacatatacagttacagaagataattttaaaacacttaaatggtttttattaacatctgccaatatatcacatcaagcatgggggaaatttaagaaatataatttaattgattatgatatatcatcatttgaggcaggtatttttgttgcacctgaacttttgaatgtaccaagtaatgttaataatcacagacaaattttagtaccaacttatggtaaggatgatgcaaatgatgttaattttttaagtaatgatgataaatttaaaattggtttaagattaccatatgatacaccattagttaaatattctgcaaatgaaaatccatgggcacaaccagaaacttctaaatatatacagtaagtactttattttactaattagttattttatttataaaatctagaacgtaaatatacaaaatgatggatagacataagaacattatctcattgcttgtgttttaacagtagttgtaccagcactgaaacatgaattacaacaaaccatacagagaccacagaaaagagtgtttatagctggcagatctaagacatcatacatgttatttgaacagaaatattcatgacattcacttttatctctttgactttgagttgcacgattggcctgtgcagctttaatcttttcttctcttgtaacatatgctttcggtggctccttatcctttggttgttcagtttttatatcttccgtaatagtaacttctttcttatcatcactatcaccatcaccactctctagtttaacttcttctaattcaggagttgcttgcttagatttagttggaatgttttttatatttgaagtagaagtttttaattcttttgcatcagtatatacggaacctccagcattagtaaattctgatctagcatcttgaaattgtgaggaacctgttgtgctgaaagatgaaattgaatttgatcttgctactgacattgtattaaagcggtaaataaagactatattatgaaaaacgaatgtgataagtaaaagatgagataactggtagttaaaactgataacgatgttcaaactgaaccagcagttgttactttcaaagtaaatccaaaggaaaaaaatagaaactgttgataacactagtaattcaataataaagaatcatgtcagaaattttgacgcaatgaaaacgtaattttactatgatgactacttatccctacttattacttagattattaatagagtgttttatatacagtgtttgttcttcaattgttgtaagtatatctgcatgtacacgataatgtagtatctctgagtataacacactctattatagaagtaaccccccctataaccttattattttttttttaagaatataatttcattaaaataactaaacatcatacactttccatagtgtgacaaatccccatgtaaattatccaaggctgtgtatggtagatttcaacatgaaaaattttttatctgcaaaaagtttctttactaatctaggattggtatgttcttcctgtataatactcaataaatcaagtaaactatgcctcctaaagttgaaactagaaaatggaaacctcctaagggtccaaagaatacccctcataaaaataaaaataccattggtttaggtagaactattaaaaatgcaaagcaaagtcaaaatcaagtttattatttacctgatggtcaaatgagatttacaactgaaaaacatgaagctgactgggttaaattaagatccgtcactcaagaaaatgcattagatgaattcttaaatactgctcaattagctgataccgattttacagctgaaaaacattcaagtgttaaaattattagaattaataatcaagctgttgatacaggtaattataatccttatttattaacttcagatgaagaagctaaaaaatttaaacttcaaaaggaacatattaaagatttaattgttccaagaagaccaaaatgggatgaaaatacaactaaatatgaattagagagattggagagtgatgcattcttagattggagaaaaaaattagcaatcttacaagaagatcatgatttattattaactccttttgaaagaaatattatggtttggaaacaattatggagagttgttgaaagatcggatttaattgttcaaattgtcgatgctaggaatccacttttatttagatcaacagatttagaaaaatatgttaaagaattaaatcctttaaagagaaacttattattagttaataaagcagatttattaacttatcaacaaagattagcttgggctgtttattttaaggaacatggtattaaatatactttcttcagtgctgctaaggcaaatgaaattttagaaaaacaaaaggaagaagaagaagaacttaaaagatatgctgatgaacataatggtgaattaccaccagtatataatcctaatggaaatcaaaatcaaaatgaagacgatgaagattatagtgatgatgaggatctagatgttgatatatccaatttaacagaggaacaaaagaaagagtatatgaaacttcaaaaggaacttgaagaattagaaggccaaatggatgatttagatatcgaggatgaacttgatgatgaatttgatggtgaagatgatctagcaagattagaacgtgaattaaaagaagaattagaagaagaatttgatgatgatgaagattatttcgatgatgaagaagattatgaaggattagatgatgatattagagaaatgacacgtattattacagttgaagagttagaagatttattcttaagagttgcaccagaaccattaactgaagcaccaccaggacaaccaagtagaattcaaatcggtttagttggttatccaaatgttggtaaatcttcaacaattaatgcattagttggttctaagaaagtttcagtttcttcaacacctggtaaaacaaaacattttcaaactattttgttatctgataaagttatattatgtgattgtcccggtttagttttcccaaattttgcatatacaaatggtgaattagtttgtaatggtgttttaccaattgatcaattaagagaatatactggaccttgtcaattagtttgtcaaagaatacctaaatatttcattgaagcagtttatggtattacaatacctgttttatctaaaactgaaggtggtacaggtattccaactccacaagaattattaacagcatatgcaagagcaagaggttatatgacgcaaggttttggttcagctgatgaaagtagagctgcaagatatgttttaaaagatttagttaatggtaaattattatatgttgaaccaccacctcatgaagatggttcaaaggcatctgatgatgaatgtttgaaatttaatcatgaattatatacaatttcacatttaccagaacaaagaaggatacaattaattagagcaattaaggctaaaaatttatcagttaaagaatttgatttatcaaaagatttagataaattaacattctcaggacatttatcaactgatgatgaaaatagtaaacatcgttcaagaacttatggtggtaaacaagctgcattatatagtgctgcaaatgaattagatgatgaatttttcaatatgactcaagttagaggtaaccttcgtggaccattttatcaacaaaaagttaatggtggttcaggtaagaagcataataaagcatataaaactaagggtaagagaaagtaggggctcataactatataatctatattctgtatcataacgtataacataaaaacttttcatatataaataaattacaatttttttgctaaatagtaaatgtttcatcacctaattctaaattaagttgattaatctctttttcaatatcttcaagattaatatctaatgtttttaaatcatcaaatcttctttgctttttgaaagtttcatacatttcagtaactaagaatttttgttcatttaatactatcaatttatctctcttttcacgtaattcacgttttgataattttggtctatcatttataatattttgtaatttttgtctttccttctctaatttaacattttgtgatttccttaatataggcaaattgattttgataaattttataataacgttctttaaattagtcaaaattctaatttcatcatttttacaattacctttattgataaataaatcaatatctttaattaatttatccaacttattaaaataattaacatacagtttattttctaagtcatccttgataaatgataaatcctctgactctaattttttagaaattaatttccaaatattgaaaaacttaaccatttcatcatcaaattgttgtttatctaacaggaaaacttttttattcaaaacacgtcttttacattctttacaaatccttaaaccaaatttatccttctttaaaagatttcgtattctatccctttcttgaattgatatatctttatcgactataagcagttcaaataacatacctaatggtacaatcattgaacaacctttttgtaaatctccacaaactgattcaccacaaattctacaatgatgtcttctatttaaccaagtgaaagtatttaaacaacattgacaatttccctgattattccaattaaccaatgatttttcaaaattaataaatgattcttcatttatgacattatttaacatccaattaaatactttatctaatcttctatcaagtaataaatttttcaatgattcatcaattaatcttttatttcttaattctttaaattcatcagttaaattattaattggtgatataatatttggtgatttattaatacaatcaatacaacaatcacaccaaataccatttttatcaaattctaataaactattaactttaccacgattaatatgatttgaacaaaatgttaatccacatatacaacaattagtaattgaactattattacatttatgacatttatttgatttaatataatgatttctaggtattgattgtctttgatttaaatgttgtgaatctatatgattatttaattttatcaatgatgacattggtatattacaaattggacattgaattgattgtggtggcggtgagggtattgttgaagatggtgtagataccgaaggtgatggagtatcgggcactggttttgacttccctaatatacgtggtttcatttatctaattgattgatatatatataaagatgcattaaaagaagatcgtacgtatctgtttaataatatatgattaaagaaaaaaatatattttacaaaataataatataattagttaattaaaaatagttaagttaatgattttgaggatttaataattcctctatcgtataataagaatcatatgataatgatttccaagagggtacaagtttatcaattaaagttggatcaacacttaattcacgttttgtaaaatttgttagttcaggtacattaaatgattcaattaaattataatttctaaaatttggtaatttaccattttggaaattttcatctcttaattcattaaaataatccattgacattgcatcaattgcacttattctctttattggagaatattggaaaatatttataaataattgttgcatttcaattgaaatatttgggaaaattttcattattggaattgatttaattgaaggaaatttatgatctttataatttggattcatatcattaatttgatcttttgaaggtgtacctaataattttatgatttcaactaattgatcaatacccgattgaccagggaataaaggttgacctaaaaccatttcagctattacacaaccagctgaccaaatatcaatttttgttatataatttctagcaccaaatattaattctggagctctataatatcttgaacatatatatgaaacatttggttctgttggttttaaaattttagcactaccaaaatcacataattttaaaatacctcttattggatcaattaataaattttgtggtttaatatccctatgacaaatacctaatgaatgaatataatttagagatcgaaataattgataagaatataatttaattgctaaatcaggcatatgaattttacgagagaaataccaatgagttgaagtatataaagtttcaggaacatattctaaaattaaattaagatataattcatccttttcatttgatttataaaaataagctaataaattaacaatattttgatgattaattattttcattgtctctaattctctatttttgaatcttttatcttgtaaaactgatttaattgctgccttttcattatttggtaataaattaattaaataaacaaatccaaatgaaccatgacctaccatactttgttgagtaaatgataaatttttttcctcatttgattttatatcaaatacaaattctgtacgtgttagtggagagttgggtgaggtgttattagacgatccaattgatcctgttgacattgtgttgtgttgtattgtatattgaatactttactatactttcccctaaagaaatgacatgacactttgatatatgactgtgtactaagagatatttctcctattattaaataatttgaaatcgcggagtgatgcactatgttttattattattattaggattatgactactattatgactatgattataattataattataataaataaataactttagataataataatattatataatatattagatgaatatgaatagaattaattatatttagaaattaactggtttatcaaagactgccattgcagcttccttgaaagcttcagataaggttggatgtgcatgacaagttctgtaaatatcttcacatgatgcaccatattcaattgctaaacctgcctctgcaatcatttcaccagcatttggaccaattatatgaacacctaaaactctttgagtttctgcatctgcaataaatttaacaaaaccttcagtatccatattagtctttgctctagaatttgcaataaatgggaatttaccagttttatatttaataccagcttcctttaattcttcttcatttttaccaacccatgcaacttcaggatgtgaatacataacagctggaatatttgcataattaacatgaccatgaccagttttaatatattcaacagctgcaataccttcttcttcagctttatgagctaacattggaccaaatgtaacatcaccaatacattgaatatgagaaaatttagttttatattcactatcaatgacaactctatttctcttatcaaaatctaaaccaattttttcagcattaagatttgatgaatatggtcttctaccaactgcaactaaaagtacatcagcttgaattttttcaattttaccagatttagtatcttcaaattcaatatcaacttcaccattagaatttttaacagctgagacaactttagcacctaattgaaatttaagaccttgctttgataagaatttttgagttgcctttgaaacttctgcatccatacctgcaccaccaattgccttttgaaattctaagacagtaacttcagaacctaatcttgaccaaactgaacccatttctaaaccaataataccaccaccaataattgctaatctttttggaatttcctttaatgaaagagcaccagttgaatcaacaattttttcttgatcaatttcaatacctgggaatggtgaaggttcagaacctgttgcaataataatattattagcagttaaaattgaatcctctgaaccatcaattggatcaactttaacttgatgttcatcaacaaatgaaccattacctttataataagtaacaccattttttttaaataacatttcaataccaccagttaattgtttaacagcagtttcctttgccttcattaaattacctaaatttggtttaacatcaccagagatatcaatacctctctttgaagcttcatgtttaacttgatggaaaagatgtgaattatttaataaagcttttgaaggaatacaaccaacattaagacaagtaccacctaatgcacctctcttttcaatacaagcggtattaaaacctaattgagcagctttaattgcagcgacataaccacctggaccaccaccaatgacaacaacgtcatgtttagcagtttttgtagcattacgagcagtagtagagaatgatctaagcatgttttcctttaccaattagaacccaattctaaatcacaagagaaataactgaacattataacagactcttcagtaaaatatttttaattaattaactacataccccactatacaagtaaatatttcggacgcgaactcggatcttagaagtccttcatgttcaaccactgctgcactctctctgtgaactcttgtggtttctctcccataacccaatggccacattggatatcttccatagtgaaggatgggaagtatttaccaatagtaggaatcatttcatcacttatatatggactctctgtacctctaataaataatgtaggtccattatatctagcattctcatatggccattctccaactgcatcaataccccttcttaatatattaataggtaatctacatttgtaatatttatcactaccactactaccatcctctgattcatttggtttcatattagtaagtaaaaattgtctaactgccttatttttctcaaatttacttaaatattcatcacattcctttaatgatttgaattttttaccattcatttcattataaactcttaaatatgtaccaaagggagaatgtccaataggtctattactcggtgatgcatcaactgaaattaatcccttaactaaatctttcctctctaatgataatgccatacccgtacgtccacccattgaatgtccaatgattataactggttccttaatttcatcttcaatcaatttaccaacatccattgctaatgtatgataattgaaaggtgtcatagctggtgaatctccatgacatcttaaatcaactaaataactctctctatcctttgataaccatctactaactgtacgtgaattactcttattaccaaacagtccatgtaaaaacactaagggagtcttactactacttttcactcccaacctatcaaatgctaaccgaactgacatcactggctttaaagttaaaaggagtagtatacgtacagaggcttaaaagtcgaaaggatccatcactatggaaaaatcaacatgaaacgcggtacgcgcttttcatacctgtcaaatttatctatcttgcatctttacgacctttatctgcctgctaccctttataaataccttcaagtccctgatgatgtattataatcactattacttcttctctcatttagtaaatgaatcctttattattttattacttatcattagctttagctgttccactcggtgaaaaaaatcatattcatcatcaacataaacgtgctcctaatgctgatccggtagcagatcctcaaccggtacctcaacctcaaccaattgctgctccttctcctgaaactgtatacgtaacaaatatagttatgatggatcaatttgatgatactgctacatcaactactgctctagattcaactccaacttcaacttcaacggacactccaaatttcagtattcaactggttaataaaaatttacaaagtgaagcatccccaagttcaactgatagctcaccaactacaactcctgaatcaactactgaatcaactactgcatcagttacaacatcagaaatagcttcatcatcaacagctaattcagatactgctcaatcaactgctcaatctaataatagtagtggtggttcatactccggtgctaaaggtattacttattcaccatattctaactcaggtcaatgtaaatcatcaagtgaaattgcttcagatatggaaaaattatcagaatttacacttattagagtctacgctccagattgtaatgttatttcagcattacttgattcattatcttcaaatcaacaaatttttgcaggtttattctatcttgattcaattcaatcagatgctgaattattagcaactcaagttaaatcatcatctcgtggttgggatgcaatttatgctgtagctgttggtaatgaatgggttaattcaggtacttattctgctgatactgttgtaggtgcagtttctaagggtagatcaattttacaatctttaggttatactggtaaagttgtgacagttgatacagttcctgcatatcaaaataatccaactctttgtgatgcatcagattttgcagctgttaatcaacatgctttttggaatggtaatattgctccagaaaattctggtaaatttattagtgattcaattgattcaatgtcaagtttatgtaataaagatgtacttatttgtgaaactggttggccaactcaaggtcaaacttttggtagtttaggtgttcctggtaaatctcaacaatcagaggcaattcaaagtattattagtgcagttggtgataaagttattctatttacaacttacaatgatctttggaaacaaccaggctcttatggtgttgaacaatactggggtttgttttaattaagataataatattttatcaataataataatatacaattctgtttatatacaaatatatacccttaaatatcgatatattaatttatttagttttctgttcttttatctccttttgttgtttaattttccatgttaaatattctacactatgtcctaatctaacattactatcatcatttaaaactctattttgaatatttaatggtggtcctctaaaccataaaattccattcttatcaattttacgaaatttttcacgtaattcctttggatcataaattccaatatcattttgctttttcttgattgatccataaatcctactaatattacttctatcaatatttttataacttctacgaattaatggatgaatagaagtttctcgtatattaaataaatcattgtattctctaacatatgtaaatgatgtacttggtgattgaaatttagaatatgtaaaacttgtattattatatggtgatttgattattttatgtgttgataaattattaattgatgatatgttattattattattattataatgatgagtttgattaacaatattatgtgtatcaataatagagttattattgataattgcattattaacattatatgatttgaatttgttatcattactatcatttaataatgataatttttgaacttgttcatattctggtgtatttgtattatgtgaatatgaatcactttgattatttaaattataattctcaattaatgcacttgatggtattctaatgttattagttggtggtacataacttttacattcattttgatttaatgaattatcaaaataatgttcatcaatttcatcatcaactcttggcacataaactgcaccaacaactggtggtgagttcatattaataattattggacttggaattggtgtactacttgttgatccaggtctcaataatcctttaattggtgatgggaattttctcaaaactctattactacttaatgttttaattggatcctctaaatgtctaacttcatcaggtaaacaagctttccaagttctgattttagcaaatgtattttctttatcattgtatctaaattcacaaatgaataatggtccatcaaatggtataccaggatctccctttaaccatcttgtaaaatatgcaacataacatggacctaaaatttcgttaactaaatgatctctatattgaccagttttaacaacttcattctctaaaaataatctatcaactctatgaacggtccattcaggtctataataccaacaaacattcatacataattcaccattttcttgttgccataatctaaaaatttgtgcaactgttggtctttgaggatcatttggattattaattaaaatccaattaccaactttataagttctaccattaaattgaacttgacttaatgggaatttatttgtttgttgacctgaaatatattcaacatcaggttttgacatttcaatttgatataatcttgaaatatttgtttctaaaacatttaaattatttttaataaattcattattaacaaagtataatctattgttattaattaatttgaaaacatctgcaacatatgcgtcaacagttttataatatctttgtttaattaaacctttaatatctaacattgaaattggatctttaacaattttcaagtaatcaggatgttcttgttgaccaggtaatttatcccaaaatgaaaccattgttttaccaccaactttaattttctttaaacctctcataattgatttaattctcatttcatgaggtttatcaacaattggaggacgaccacgtttaacccattgatctaatacttgtctatttggtgtgaaattaagtacatttggaggtggatagaaaacatgatctttacccgtatcctcaattttagagacataagttgaaggattataattttggttaattgtaaatttatcttcattatcataagtttcttgatcattttcattttcataattatcatcatcatcaatatgttgttgtgagttagtggctgtagttgcattgttaacattagtgttcatattagtgtttgtattaataggaatagattgagtattgatattattattagtattattacccattgatatattatttggattaatggttgttatatcatttggattaatagttgacatttcatttggtaaaggacccaaattaggataagttaaactataagtattaacaattttatgatcattgtttatttttggtataactgtatccttaatataattatctaaaattgttgcaaatttataaaaatcagaagtttcttcattaaagaatcttgcattccaagtgatttgagctaaatcattgataaaagcttgacttgaagtatatttatgatgctttgatgccattttaatcttagaatatgacattggaactttaattactttataatattctaaatttgcacgtaatggtaatgcatggaaggcgtatgagaattcattaccattttcatcgaccaatttgtagatatcatcgagtataccaaagaatacatcgttcatataattcttatccctctcactaagtgacattgctgctgttatctaatttaaaatatacgaaaaagataaaaaaaactacaattataaacaacaagctcgttgttgacggcgttaattttttttgattttcaaagaggtcctcctatagattttcattacgtaagtttggacatctctctagctatctcttaaggtaagacaaaatacatcagtatggacagtatggacagtatagaggagtttcagaagttcttatatgacaagacattggatggacgaaggataaatgtgctggctttggtgggtgcagggctatctgctccctctggtgttataccctcaaatataggtgatactgatggtgataacgtttggaggaattattcatttattgatttagcaacattagatgcatttgattcaaatcctgcccttgtttggttatattatgctctcaagcgacatcaagcattaaaggcagaacctaatgaaggtcataaggtattggctcaattaagtaatttgaatgataaatttaatttactaacaatatctcaaaatatggatggtttacatcatagaagtggtcataatagagagaaattattagaatttcatggttcattatttaatgttaaatgtacaaattttatgtgttattatagtaaatatacattaaaagatcccttaactgattcattggatgttactaaatatgaagattcagaaaatacccaattacctacaatcaattcattagatcaattaccattatgtcctgaatgtttatcaaatggtgaaaaatatttacttaggccaggagttatttggtttggtgaatcattaccattatatctaattgatcaagcagatgaatttataattgaaaatgatattgatttgttattagttattggtacttcgcatacggtttggccaacatcatcatatattgatgttattaaaaataatggtggtgatattgctgtttttaatatagtggaagattcagagattgataaaattaaagaaacttcaaatacaaaagtttggaattttattggtgattgttcaattacattaccaaaagtgtttaattcttttataaattcttaataaatatacatataacttatttgtctaattatttaacctaaatatttccatattaaatacataatgaataatgttaatgaaccgaaaacatagaatataatcttatcctcccataaaactttctcaattttaccaacagtttgatgacttacacctaatgtttccaatccttgactcattttatcacgtactttaaataatgtctcattttgttcaacaatatcatcaaatgctgctctacccatctctaaaatttcatcaagtctagcattacctctctgtaatttattctcttgatccatcattgaattaattgaatcatcattattattatataaaatatcattgaatcctttgtttctattatttaatccattatatgggttatcatcaattccacttgctgttgattgttcaaataatccattcctttcattatttaaattcatttgtttaaattcatttattttatcctctcttttcttctttaattgttgaaattcagttcttaattgctcatattcattgaaaagtctttcatatcttaatctattcttctctttagcattaggttcagtttgattgtttatatatttgtcaaaatcattcaataatctattaattgaggttaatgttgtggaaattgtaccaattaatgataatgtcataccattcgatatattaccttcatcattcaaattactacttaaagtagatatatccttactcacttgattgacatgtttagtagtttgtttatataataaactcattgtcttatactacaccagcgtgccgaaagagatctataaagatgaagctattcattgaatggcatacattattacgtaaaataaatttccatttcaaaacatgttaataaacaacaatacttaacacttgatcaattatacttctttcaataattaaactattatacaaacattatatctactataataatatctaatatactactattcattttctaaattagctaaaccatttaaaccaaataagaaacctaattcttttctacttaatttacctgcatttctacgtgcatttggatcaagcgcagaaccaaccatttcctctttttccctctgtaattccataattctatcctcaactgtaccttcaattaataatctatgaacgaaaacttccttcgtttgagaaattctatgaactctatcttgagcttgcttttcaacgaatggattccaaaatggttcagaaataataacatgatttgcacatgttaatgttaatccaacattacctgcctttaatgataaaagtaaaattcttttcatcggatctttataaaatgaattaatacaatcatttttagcattaatatccattgatccatcatattgtaaaaattcaaaattattttcacttaataagattttcaataaatcaaaatatccaataaattgagagaaaacaataattttttcagtacttgactttttgaataattctttaataatatcaattgttttattcatctttgcagttattaataaattaccaccatcttctgcaataaatttttgtaaagttttcattctccaatttttatcacttgccttagaatctaaatcaaattttttcctaatttcttgccatgttaaaccttcaacaaatgaattaaataattgtaaatcaactgattttgtagatgaattataaattccgcaaatattacattttgctgataaatcatcacttactttactttcacaattatcttcaaaaaattcatcatgacaatcataacaaattgtatgaccacatttactcattaatagagtttggttagttgttaaatcttgattacataccatacaattaaaactttcttcattttcaactttagcaattaaacctttgtaaacattatcactatattctttaattgattcaaaaccatttttaaatctatccagttttaaaactctatcaccatcatcacctaatctaactaaatattgatgatcacatgattgtctcattctaagtaacattgttaaaattgatgaataatttgtatttcttgaatttaataaattatttgcagttttagcagatttattctctaattgatcataaaattctttctcaattgtacccatttgaactttaacttcagtaacatgtttttcaggtaatgataaaattggtttaccatcaatttcatcatcctttgtacgtcttaataaaattgcacttaataatgcatgaattttctttgtactaccacctccaccatatttattattaaatgatgaaacaatactagtattaaatttattccaatcattataaggtttaatatctaaaaatctaattaatggatataattcttcaattttattttgaattggagtacctgataaacaccatctataagttgaagttaaaaatgaaactgctttagatgcaattgttgctctatttttaataaattgagcttcatctaatataattctatggaaaattgcattatttgtataaaatggtgaatttttcatacctttgatttttttctttaaagaattttgttgaatatctaattctgtaccataatgttttttccattcagatcctaaagtttgataactaattaaaacaacatcaaattgtgataattcattaaaagatttaactttattacttgaatgataaaggaaagttgttagtttataatcactttgtaatttcatattaatttcttgttgccattgttgtaataatgaaactggaccaacaattaatgttgttttcaatgtatcatcctttgatttatttgaaacaattaaagaaattgcttgaactgttttacctaatcccatatcatcagctaatataccacctttatttggagaattttcaattttcagcatccaagataatccaattctttgatgttttaataaagtaattgctaaatcttttggagtattggctaaaccttcttcctcaatttcacttgccttaatagattccattaaatttttaataccttcttcatcattttgtgcattattaccaccattactataaatatttgaaaatggtaataaatcatcagtatcatctctcatattattatctaaaatttcaaatatttgattagatgagaaaggatttgaaggtatttgataattattattatttatcattgggatattattattgttgttaagattatttgccataggattatttggtaagggtattttaggtaaagcaggtggagaaagtgagaattcacgtaaagttttagttggatctgaattataattttgaaattgatacattgttctaattgtattattcattagggtaacttctggtaataatttcataaagattttatttgaaggtattgttaatgaagctaaacttgaaccatttctaatactattaatacattgaattcttaaattttctaattttttagaattttcgattgttttcaatttataacttttcaaacgatcaattaatagaccaacttcaccgaaaaatcttgaaagttgtgttaatcttgaattaataaaacgtaaaatttgattataacgtaaatctgcctttttattaccattatattgtttagctttagcagttatttgattttttaaattagttacatttttcaaaaatatatcaattcttgaatataaatcattaaatttcataattctaaaattaagtgaatgaattgtaaataatacatcatctctaaaattcataacacataaaggtggaggtaaatttgatgaaatatctaattgaatttcattccatgatatagtatttggtaatatggggaaaggttcagattttaaattattatttataattgaaggaaatggtatttgatatttttcaggtaattgtttaattggaggataattttttaataaattattaattcttaattgattttgatgattaatttcatctgattcacgttttaatagtgattgttgaaattcattctctcttttaatattttgttcaactaatgattgtttatttgcaagtatttgttgtctctttaaatcatcaatacgcgtagatgatgatatatcatcattcatttcgcgtttgaaattattattttgcgtattaaaagttggaggtagagaatttgaaaataaattagtgaatgaattatcagttgatattgaaggaggtttagaaggtgcaatacctgttataattatatcatcatcatcatctgaatcattatcattatcatcatctgaaccatatttaaaagctaaattagggcgtttattaatattttttattggtattggaggctcagttggtatagttatattattattattcacgttattattattcacattattcacattattcatattattatttatacttgtatttatacttgtaggttcagatattttcttcttattgaacaacgtactatctaattttaaatctttagccatatcaaaatcatcgtcatcatcttcttcatcagatgttaatgatatataccctggtaaaggtgttaatttattaatactagtattattattactactaatactattattattactaggataaagactagcagtatccatatttaaacgtcgtatatttgccattaccttttcaaaaagaatgcaaattcttatataaaacactacacaattataaatcgccattctctaattgcaaaagaactgttgctcgcgcaaaggctcctcttaatagagggtgatcacccttaattgagatacctctctggaacgacgcgacggcctctctgattaaaccacaatgtaattgagctgtaccatgtctaagatgattatcaggtattgttgcaccgagtaatattaaaacttctgaatcttgtaatgccatttgataatttttcattgccattgatgcatcacatctacccattaaacaaactaagaattcaggtaatgaaccttgaaatggttcaaatgatgatcttgattttgctaattctaaacctcttgtaaaagcagtgaaagcttcattaaatctattttgacgtaataatccttgacctgtttcatgtaattttttaatttcaagtgataattcttttgtaaaacttgtaggtgatggaggtggtggtatatcagaatttaatgaaataaatgatgaataaagggaatttaattgtgtaatttcagtttctaattgagtattatcagttgatatacttttagatgtagtattgtatgttattggtaatatagtcattgatgtaataagaaaagaaaagatattataggaattgttccattgagaaaatcaaattaggaatccatgatactgaaaaattaaaattaaaacacgtattatctaatctttatacttcatcttcactatactaaacatatgggtaaatattattgtcattactgtcaaacacatctaacacatgattctccatcagtgaggaaaagtcatttaaagggtagaacacattgtcaattagttgaagaatattacaggaatgttataatagagaagaaagatactattatcaatactaatagtactaatagtactaatagtactaatccattaaacagtttactattcaaggggataccaggtagtagtagtaatagcagtaataataataaccctacacacacactaatactaccatacccaccaacagataactcactaccatacccaccacctactgtataataatagtaatactaaataacaccaaatttccgagcaaagagtaaatttccgagcataatactaataataataataataataataataataatgatccgtcatagtaataagataattttccactgagtggcgaaaaagtttttttcttcttctcatagtgttattttagcatatttgctttcatcactttatacactcccttctctccttttggtagcttcttttttgtgtttactttcctactttctttaaacaaattaatattcaaacaatggcacaacaagttccaacttttaaattagttttagtaggtgatggtggtactggtaaaactactttcgttaaaagacatttaactggtgaatttgaaaaaaaatatatggcaacttcaggtgttgaagttcatccaatgtcattcttcactaattttggtgaaattaaattcgatgtttgggatactgcaggtcaagaaaaattcggtggtttaagagatggttattatattaatggtcaatgtggtattattatgtttgatgttacttctagaattacttataaaaatgttccaaattggtatagagatttagttagagtttgtgaaaatattccaattgtactttgtggtaataaagtcgatgttaaggaaagaaaagttaaggcaaagacaattactttccatagaaagaaaaatttacaatattttgatatttctgcaaaatcaaattataatttcgaaaaacctttcttatggttagctagaaaattagttggtaataatcaattagaatttgttgaatctcctgctcttgctccacctgaagttactgtcgattcagacttaatggctaaataccaagctgaaatggatcaagctgctgcaatgcctctacctgatgaagatgatgctgatttataagttcttattatgtaatcaaatactttctctctttctcactatataaaaaaaaaactaaaacttttttcaaccaattaaatctcacctccttttctcgcccttttttttcgcctattctccataatacttccatttgtttagtgtatagtacaggtacacaaacatcttttgaatattgatttaaacaagctaaaaatgttcagacaatctttaagacaattctcaacaactttaacccgttcaaacattattgcagatctttatgttaaagaattaaaagcttttaaaccaactcctttaacaaatgctgatgctgaatctgcaacaaaggcatggaaattaccaagtgctgctaaaattcctgcaattgaaggtgaaggtgctgatgctttagctgcttatgaatctgctcctgttgatgttactacctcatctgctgatggtaatgttgttgcagaagaatataaacctgatgattggttcgttttcccagttgatgaagaaccaggtcatcatgctcattaatttatgttattatcattatcattattatatattaataatattcaattagagagtataatatagtatggtatactttacaattatatttatattatttatttatatgaatttatatttatttatttattacgaaaaaaaaaatatatcaatttaattcaactgttttaggtttatcatcatcatcattatcaccaccattatcaccattgttacctacttcaccattatcatcattatcattattattatcatcattattattaatattactatcaattctaattagatcaccttcaatttcattaaatgtaattatactattaccagttaacatatcttgtaatttcttatcttcttcactatcattctcaattgggaatggattattagaactatatcgtttaccattcttttcaatttttaaacttttactacgttttggaatatcaattaaactaactttaggaaatttattattaatattttcaacttcatctttaatatcattattattaatttcactactctcttgaataattttctcaatttcttcctttggttcaattaaaattttaggtaattcattattactttcattatgaattgaaaatggatcttccttttcaagttcacttatttcattttccttaatttcactagttttatcaattgttaaacttgaatgacttttagatccggtatttgaattagtattaatatgactactactactattcatattagtagaattcatattcatattcatactattattaagattaggattagaattagaatttgtacgtgtagaattcatattcattgtattattcatactaatactattattcatcatttccattggatcctttggtaatcctttaaatggtgaaaacattggtatgatacttggattaaatggttcaattgcaggataaatttgttcattatttggatatttatattcccctaatccataaaaatcattataaccatcatttataattaatttattaatttcttcattatttaaattttttaatttacaaatttcaattaaaacttgataaatatttggtctaaaaattggattctcttgtaacattatattaattaatttttttaaattattattaataattggtttaattgggaatgaatatgctgaatgtaaaatacctaattctcctggtatttcaaatggtgttgtataataacataatttataaagaaatacaccaaatgcccaaatatctgatttttcatcaattggtaaacctctatataaatcaatcatttcaggtgatctatattgaggagttgtttgcattaaaatatcattatgtaaaatttgaaattcttgatgattttttggtacccttaaaattggacatgttgaaccaaaatctgctaatttaaattcaaaattttcattaattaaaacattctcaattttaatatccctatgaattaatttaattttatgcatattaaaaattgctttacttatatcaaacataattttcaaaatttcttcataatttaattttgtacgtaattttaaattcatataatctaataatgatttatttgaacataattccattaaaactaatacttcatatttacctgatgatccatttaatctacttgcatttgaatcataatatttaacaatattatcagatttacttaatctttgcataacttcaacttctgctcttaattgatttaatccttccttatttggtacaataaccctttttaaacatgcaatttcactattttgttcacttggattaattttaacaatataaatatgtgcaaatcctccttcacctaaaaatttcataattgtaacttgatgtttaccaacaattaattgtgtacctggtaacagtttctccaacattgcaggtctaacattcataccttgttgtggaacttgttgtggaacctgttggggtacttgttgtggaacctgttggggtacttgtgggggtacttgttgtggaagttgttgaggtgcttgttgaggaacttgttgttgtggtatttgaggtacttgaggtggaatttgtggaatttgtggtacttgcggaacttgtggaacttgtggaacttgtgaattattataatgaccattaggtgaacgaatatttggtattgaattttgttgttgaatatatgatgaatttgaagaaattgatgtattatgatttaaattaccattcatctgtgattgactaattcttttaggtggtggtatcggcggaatattttcaaatgttggattatgattaatattattatgattaaaattgatattactattattaatagaatttggagtatttgttgaatgtatctttgcaatatctggcattacaatattattattatttaagtgaattggatttaatactggtgatgttgaactcttatttgattttaatgatgaacttgtattaaaattaaattgtggttgtgatactgatggtttattaggaattattggttgttctaaattaattgaattaaatgatttattagatttattcatgttaccatgattatatatcaaattaggtgaattctgttccattgtttaagttcaattgatttcaattgatttaaaataaactatgtattaaatcagaaaatcctaagagagacttaataacatgtgataggtataggtagactaaatttataactcaataactgcctaatagactgtttaaaaattgaaagggttgtgtgatttgtcaaacagtcgcgactaagccttttgaacttttacacgtgataagaatattttaaaaaaatttaggaaggagtaactttaagtactggtttaatgatgaaaacaaagtaaattcgtatcaataagttaaatttacagaaagtggaaagttataaaaactatgtatagtaataaaaaaaagcacacgatattagaattaaaatttttgaaatagactaaacagttatcatcaatataactatccagactctttaccattaccaacttcaataacttgttcatcaactgatgagttagtatttgaatttgtattcttaaaagtttctaaattaccattaccagttaataatgaaccatcacctaattgtgaaatatcaaaaccattttcatttaaataagctaaaaattcaaaatcttctctttgcattgcttcttgatcaactgctggtaaaccaaataatgctaaaataccggcaaaaattgctaatgatgatgcaagccaaaatggaacttgtaaacctttaacaccaggataatgtttttgaaatgatgggaatgcataagtaccaacgaatgcaccaattttaccaactgcagctgcaataccataataaacacctctaactggagttgcagaagttttagcagctaataaaccaatattatcacctggaccaaattcacctaatgtcataaaaataccataaactacaacgaatgcaccaatatgttgttcaagatgaggataaagacctgccataatataaccaataattgcttgtaaaaaaataccaacaactaaagttaatcttggaccaaaataatcagttgatatagcaccaaggaatgaacctggtaaatagaaaagatttaaaacaacattccaaccaaaagttttatataaatcaccatctggaataactctctttaaaattggtgatgaataaataccaaatgcataagcggaaaaatcataaacccaccaaataattgaaacaattaataatctgaaccaataatatttaacaattaataagataggaattctagtatgtttgaaatttaatttttggaattgtttaccttctttaaagaacattctcattatgaataaagaaattggaggaattgcaccaatacctaaagtaattctccaaacaggttgtaaatgatctttaccacaaatccataataaaaccattggaacaaaagctgagataacgaagccaaaatcaatcataaaattagtaaaccaagtaaaatatctatttcttttacctgcaggtaataaagatgaagcttcagcacaggcagctgaaccagttggatattctgcaccaatgaaataacctaagaagaatctataagctgttaaagcagcaaataaaccacctgcattaccaccaacatgagcttgagtacctttaccccaagaacctgcagctaaaattgagaaaaggattaaaccaccagaagatacaagcataccaacttttcttgaaatataatcagagaaaacaccaaaacttaattgaccaataacagtaccaacaaaggcaattgcagaaacattttgtaaagcacgagattcggtatattgatcaccataaatgatggaaagacaagttgaagcggtaccgatagagttattaacataaccatcagagaataaacctgcaccagctgtaaagataggccagtaatcttttttaccacttggagcaatatcttcttcttcaattgtaacaatgttaccatttttatcagtaacttctaagacttgtaaatcttctggggtaatagtatttctaccccaagtaatttcctttttaataatagatggtaattttttgaaaggcatttttgttgcttggagagatagaaaaagaaaagaaaaaaaaatatcaaaatattaatataaatatcaaaaaaaataaaacatgcatgaatagtgaaatacctgagaaatagacaagtttaaatagaccagaaagtgaatttaagaagacggagaaatgaaaagaaaagaaaagaaaaaaaaagaagcagataacaataacgcggcaaattaattattaagttatgacattgagttttaaagttttattaagttattaaattacatgtgcatattaaattattaaattatccttcctaagtaagtaatatctttctcctgtaacactctaatatgatcctttgagttatttatccatatcaacgtgccctaactaaagaattctaataattaattgaatatagtacttggttacttaattgatgtattattattatgtattactatgtattactaaccttattactattattaaccttatcattactactactatattaaagtttaacgaatactcggaaaaaacaataaccgcttctaattttccatttacttgtacagagataagagataagatagcaagatagcaaaagatgtaggaaaggggaaaaaaaaagaggggggcgatgtgcatgctaaatttttatcatagagataagtgataacgtaactgtatagtatagaaatcaaacgctcatctcatcgtagagaaagtactaaaaataataactgtatttaatgtacaatttgacatattaacagtcaaaagatgtaagtacaatttcaaaaactgttgatgatggggtatacaataacccttacatcaataagggaataaccctctgttaaatatatacaatttgcacgtgggagagagtgtacagttaatattattggcatgtgaaaagtgaaaaggggttatactgttaccatgtgaaaattgttatctttcatttatttaatttcgcggctgtgttgtttgaattttttaatttgaaaaagagagataaggatttattagtattatactataaattacttccattacatcatccattactacattacaaaatattgacaggagagtgagtagttgattgactaactgtacagacaacttagttgacaaatagtgtaaggatattagtagatattaaataactttatttaacttactggtaaggattaatattatcataatattgttataatttagtacctgaacgtgggagatggcattgatcaaacgttacttctacacatggggagcccaatttattttaatttacgtaatattttaatactagcacatgctcatttttcggtaattgacttactacacaagaataatcactattactatatttaatttcatcaggactcttccaaatgttgagcttgctaatactctttaagaacatgaaatttttcatatctgaaattaaaattagcagtttgataaaataaaattattaatagcacttctggaaaattctttattattatgttttttaagttaagagttaatttggagatctttcaacgtagcattcataagtgttaaaatttattctcttcttcttctgcaatagataatcattagtaactaatcttgaataattaaaacaaaaaaatgtatacttttcgttttttttctatacatttgtctgcatagagaattttttttcctcttaatattgatgttctgaatatctcattatgcatcacaaatgtaaaaatttcttctttcatcttgtaaaatcaatcaaccatcaggtttaaattcataagtaaacataataccgattggaaacgcgttttagtaatgtcacgtatatgagtaagtcgatacgacgattgtgaaataatcaaaacatgacgcgtaaggaataagtgaaattattttagattatattatatatacatcaagatcctacaaaatttcagttattatttcacaaagttttcaatagagcaattatatacactaaccgccattacaaacagcttactatcatcaaatggaagtgtttgaacaactggaagaaaattcagaaaaaaatgctaattacttattagtaaataataatttagaaaaatcaaataatatcgatgaagataatagtgatattaataataatatagataataataatgatattgaaaataatgatgataatgaaaatgataatgatgatgataatgaaaatgatgattatttagcacatcattctaaaatattatctcaacaatttggtattcaaaatgatgatgatatagatacaagtacgaataatcatagtaataataataaatctcgtgatttgacaagtgtagttcaaaagatgaaacttaaattattacaaagagaagagaaaaagaaagctcaagataatcaagataatataatattaactaaagaaacttcaactcaaattcaaatacaagatcaatcaactcaaattgtagtcactcaagattttaatgatgaaaataatttccaaactcaacctataaagtctacacctattggaaaatttgatgaaatttcaacaaatattatacaaactaacggcaatgataatcttgaaaatgataatctagaaaatgatgaaatatccacaaatgttatacaaactaatcaaaatgatgaagatgacgatgatgatgatgatgaaataattaaagttaaacctcgtactcttaaaattactgatgaagataccaaccgagaaaaagaagacaataattatgatgacgacgacgatgatgatgatgaggatgatattatcaaaccaacccaaagaagaaaccgtattgttgatgaagatacagctaataatgaaaaaaacgcaatttcaacatcaaatatgacttcattatttgttcacgatgaagatggtgatgaagatggtgataatattgaagaccaagttaatgcatttcataaaatgacaaaagaacatgatttcctatcaagaaaagtttcagcagcaaatgaacataacactgatgatgattatctgctgaataaatcaaaaatgaccttaaatcgtaaagagataattgaagagaaaagaattaaacgtgaagaattagctaaacaattccttcaaaatgaattacttaaaaaggctgctgctaaaattgaaaaaattaatccaaccacttactcaaaacaaaagttattaagttcgttaaaggcggatgcttcaaactctgataatgatgattctgataatgaaatcaataataacacaaaaattgaaattgtcaaaagagaaaatactgattctgataacacacagttttcaaatttagattcacaggaaattaattcaccttcaacttctccacttgttgaaaatcataaaaagaaaataactattaaaagtgttttaaaaagttggaaaacttcatcaacgcataattctgagtcaaaattagttgaatcaaaaaatgaaaagatagatgatgaaagtactaaaacacacatcaatctcgatgattcttcagatgatgaagatgatgatatggacgtaacaatgattaaaaagactaaaactttagatataaaattaatattatcaagaagacaaaagaataaaatagagaaagttcaaaaagaaacattagctgataaaattaagaaactaaatgctaaacaattgaaaatgaaatatatgaaatcattaaatgatcatcaatataatcttaaatcaaataaagagaatggtgatttaactgatgaaatgttagctaaaatgttatatgaagaacagattaaaaattctaagcgtttaaaacaacaaagtaaacttgaaaaacaaaaggaattattaagaaaaggtaaattcccatctcatgatgatgaatctgaagatgatccagaattcagtgaatattcaagtgaatttgatatgtctgatgatgaagtacaagttgaaaatgaagatccagaaggaaaaaatgaagataaagaagaagttgccacagaagataataagaaagaatctgaaccagttatatcaacacaaaatattcaagatgatacatcttttaagttaactcaaaatgatgcattgaaagattttaatttttcatttggtgaacttgcagatcaagatccaactcaaaaatctcaatcacatttaaccactcaagaaaaatttaagaggttaaaaaatattagtatgactgaacttcaggatgaaaattcatcgaattcaatatcaatagataatgaatcaagaatatcgaatgatacttcatttttaacaaaacaactaaataatgctgatgctaatgaaaatcaaatccaaaaaagtactagtaatgataatgaatcaaataaaataaatttcaaagaacttcttgattcacaaaatcttattcttgaaactcaaattgatcaacctttagaattaactcaatctgtctcacaatctttaaatacccaaaatgataataatctatttgattcaagtactcaaaaccttgagagaacagaaacgatagaaattgaaaaaaccgatacagtggataatattatggatactaaaaaaggggaagaaaaagcaggtgatgaaaaagaagaagatgatgatgatgatgatgatgaaaagattaaaattccaagaaaagtccgacttgacaatgactctgatgataatgattctgaagttgaagaaactgaagaagatagacaaaaagttgcagagttaattaagttagctaaaaagaaagaaagagaattagctaaacaacgtgaacgtgaatttaaatctaaaggacttggagatattatggaaaatgaagctgttgaatctgatgatgaatatcacggtgttggtggtgcagatagagatttatcagatgaagaaaatagtgaagatgaaaaattaattgatgatgcaagtaatattcaaactgatgaacatgaaataagacgttatcagcttgagaatgaattaaaggaagatcaagaaaaagtttctagaactttcaaagatattaaaactcataatttaactaaaagaagggcaaaagatggtgtttatgcagtggatttatccgatgatgaagatggtgaagagaatgaagaattattacgttggcgtgaattaatcagaagacgtaaaattaaagaaaggaaagagtttatggcaaataataaatataatatttcagaaaatgatccaaagaaaccattttttgatacaatggcagtcaatttaccttcacatatttcaatttataaagattcattatcgttaactgaacttgatgaagataattctgatcatgaagctaaagatgtaaacgataatgatacaatcactaaaagagattttcaagattattacaataatacaaataatgaaatttcatcttctagtgcttcattgaaaagacgcaagctcaataaagttaaatcatttaatgatgatgatgatattagattcagttcattcaaagatcaagaatatgagagagcaagatatgaagttttatcaactgatgaggaagatgatgatgatcatgatggttctaaacaattaaaaatgttaaagaagaaaacttctgtcaaactgcaaagaagaaatcatttgaatagatcaacgactagtatttctgaagatgtacatgatgaattttcagttggacttttgtcaaataaatctaattcaattactgcatcatttaaaaagattacagagaaaaaggttaaaattagtgctaatacaggtaaaatcatcagagatgtccaagttacaacatcatctaaatcaattgccaattctaaagttgctgtttccagactaacatcaaatgaatctgagaataataatttaataaagaaaccaataaaaggttcaggtattgatagactcgatagaatgcttgctaaaggtagaaagctgggtatcaaaaaattatcaaaacatcactgattgatggtctttatagaaaattgtgtacattatatttttataaattttaggtattatagcaaagaagtagattatatatattattacaaagttgattggttgttatgcatgtgaaacaaaccaagtaagagggttttatggttcattggccagcgcatctcttagtgcactataactgacccttgaactaaccactgagttttgattgaaactagagccatatccatgtcttaccatacgtcttccatttctatcaattgttaaagatgaggaggatgagttaaaggttggacgttcatttaaaatatttctattcaactttattggtttagtggttttttgtgggccagctccattttgtctttctctattcaaaaaactctctgatggtaatgtttcagagtcattgttatttattgtgtcaacatcaccactcatgaaagtggaattcggaatgaaacttttaatccaaaatgaaattggttcatcattggtataatcatcatttattgatgaagcttgattattcagttttggaactgaaataggagttgaaaatattttagaaggtatccaagaattgattaatggagttttagaaacatcctcgtgaatttgagtcttatcagaacaggtaggtgatgaaatatttaaattattgacattggaattcaaaatgtttaacatatcctcatgcacattagtgctatccttgaatgtattaaagaaagcagtatatggttgagcagatgatgatacaattgggttattaggtttcaaccatttcatagtttgagccttaagatcaagatttttctcccttagtggatattgttttgctgattttggatccacagagaatatactttcatgtgatttacttcgttttaatgtcataagtgatggtttcttaaaaaccaatggtgttacattttcactaccataactatcagtcgaatcagaatcagataatccttcgttataattattatattcatcagggtctatatcactataactgccattaattgatgttttgttaacagaatatctcttctttcttttgtatcttgattttatgtttgatgtattagtttgatcaaacgaaaagagtgagtcagtaatttcagtatgtttgagtttatcattcaagaatcttttattcaaagcagccccatcagacacaaaatgacgtagagattcatcacttgaaattccacctggcgatctattaggtaatgatatatggtgtctaagttgtctttcatcaaaagatatcgtgatgtcttggtaggtatcttgatcagattctatcatttctgattgaacattaccacgcaaatcatcaaaaagttcaaatgtctcatcaactccttcatcaattggtggaagatcaattaattccaattgttttttcattgattttgaggaagctttacccctaatagttttggtattttgcgttttcttctctgtgctatcatacaatgggttttcactcatagtatttattttaaatcctttcagtggataaatttctacttctttttttgattgcataggtgttatattgtgattaaaatttaagaaactttccattttcaataacttcttttctttctgaacatcgttaggatttcgttttgtgtctttgattgttgaaagagatatctcagaagatgaataaccttcatccattgatggatgtaaatctgagttggagaatatggaagttgatctcatatctgagtgttgtgaaataattgatttatcattaaatgaactatcttttggtaagtgaccattgacaactgttaattgttctttaagataatcgaattccgtacacaggttatctaatgtagtctcagttgttctccattcaattttagaattaaaatcatcaggtttgaataaataagtatcatctttaactttatgctttctttcaagattattaacttgcttttgtaaaaattcacatcttagattcagggaagtcatatgttgttcaaaaatatctaaattctctaattgggtttcaatattatacagttgatcatttttggctgatatttctctgttaagtgataataattttttctgtaaatttttattgacatctaatacttttttggattccctttcttgagaagatatcccagttctaaaagaatgcattataggagacaagtaaaatataaatatttttcaaacttaacctttccgcttttcttatagcaaaatctagagcactgccttaccaaatataaattaaacaaaagggtaaataaatgtaactcgtcacaaagtaaactaaagttaaagttaatttgtacaagtcaaatcatatcaaatcattaataactgttgaagatgattttttcattacaatgttgatgttaaaaaaaatctttgtttaccttttgccagatcgggacaggcgcggtacaaattatggcttatctatagacagggtctagtgacagtataatataagtttatagtatttagtaaagggtatgtgttatataaattacatgaatattaaagagtaaagtcatcaatgagctttaattgttctgcaatatcggactgcactttcttctgtttttcctcagtctttacatcattagccaaatcttccttcagtttatctgtgttcaaacttgataatccaacctctttcttactttcaggatcactctcgttgccatcaacagtggcttttgtgtctgtatttgtttccattgacatcattatgttcattatgtcatcttctgtagtattattatccattttttcaatcattgctttaacacttttactcattgacttttgtttggtctttgtcaatggcttgtttggtttctttatcttatcattcttattctttgtgttcttattattattattattcttaccacgaaacatctctgtatgttactctaaagaagtaaacctatgttaaactactattactgtacactaactaacatgaattttttttgaaaaaaaattttttgaagatgagaaatttcctaaacggggttaccacgaataaaaaaatttttcacatcattaacttagattaaggtcttagaaatttactatactgtttcttctaaaagatttttgaaacaacgaaaatttatacaaagcaatggtttcaacacataaaaaagaaaaaccttgggatactccagatattgataaatggaagattgatgaattcaaaccagaagataatgcaagtggatcttcattccttgaagaatcgtcattcatgacacttttcccaaaatatagagaagaatatcttaaatctgtatgggcagatgttacaaaagctcttcaaagacatcatattgattgtactctagatttggttgaaggttcaatgactgttaaaactaccaaaaaaacttttgatccagttcaaattttaaatgcaagagatttgataaaattattagcaagatcagttccattccctcaagctgttaaaattttacaagatgatattgcatgtgaagtgataaagattgatggttattgttcaaataaggaaagattcattaagagaagacaaagattaattggtccaagtggtaatactttaaaagctttagaattattaactgattgttatatgttagttcaaggtaatacagttgcagttatgggacctcatcaaggtttgaaaactttaagacgagtaattgaagattgtatgcaaaacattcatccaatttatcatattaaagaattaatgatcaaaaaagaattagctaaaaatcctgatttagcagaagaaaattggtcaagattcctaccacaatttaagaagaagagtgttgcgcgtaagaaacctaaacaatctaaagaaaaggctaaggtttacactccattccctccacaacagttacctcgtaaggttgatcttcaaattgaatctggtgaatatttcttaagtaaaaaggaaaagaaggttaaagaattacaagaaaagaaaaagaaacaagatgatatgaaggaagtaaggcaagaagaaagagcaaaagattacgtggctcctgaagaagatgttagagaaaacccacttttgaaaaaaagtaaaaagagaaagaatgatgatgttgaaggtgatgatagtgaaaatactgagacttctgaaggtaaaaaagaaaagaaagaaaagagaagtaaaaaggataagaaacgtaaatcttctgaagaatgattttactttgaatcatctacattttcgcatgctattatattatatttgtacacaatttttttataaattaaggttagatagatcattttcacctatatttgggtatattttaaaagctagattagtacattatggattccattgtctggcttgagtaactgatgccatattttcaccaattatcgaaagtgttccatcatttaaagttaatcgatttactgtaatattatcagaattattgttatttgtcaatgtactttcatctttccatatggaacctggatcttgatttcttttacgcatcttctcttcttgttcttttattattcgatccaatgaatctgtagcactgtattcactatcattgtgattttgaaaaactttatagttttcagataaataatgatccatacgtggtttggattccgtaggtgtaggtacgtagttggttttagctttaatgtattgatttctaatattttggattattttggaaagtctgggtattgatgtatcgttattttcctgatacaacaaagttttgaaactttcaacatcaaatggttctcttagagtggattctgaatccttttgaacgttgtcatttgatttcattgtctcgttcaacatgaagttatcatcatcatcatcatcatgatcacttttcccaccagttgaactaacatcattagaatatttctcgaagttactagctttttgtcttttcctaattctccattctcttactagcaatattgacaatccaaccatgctaaacaaaaaccaaattccaagaatacataaggaaatataaagcaatatcatgttttgatgtttatagaatttaattacttgatttaaaatattctttgctttacttttaaacttttcaacagagtcatcaaatgaatcattaacattggcagctttaatagatgccatttcagctagaatagttttcggatttaattctggcatttctaaatgggcattatctgataaccatgtcattgcattttcaatttttttaagttttgattcaataacacatccaacaatttgttcaataggttcatataatggagttcctttgaataatgcatctaaagctttattcatttttttatcaaattcagatactgtattattaatagtcatagctgcagtatcaacccatgcaaatagattatcattaatatcatcttgataatcacctatataattattggtctcatttgtccattgattcaaagaatcgttgaacgatccatatatttgagtttgtgtgttatgaaaaagctcatttcctttctgtgagaaatcaagattggaaataaaagacagaattatgaattgacaaataacagttgcaattcctaataagcctagtaataggaatgaaagtaagaatggtgatgcagaataattgaaaaaccatcgtatattgtttattaatataggatttcttaaacgaaatatcttttctatgataattgaactcaggaaattagatgttctatcttgcataattttgataacttcaacattatattttttcttacttaaagatttaataaatgattcattggtaaaatttaaatgatttgcagcttccattattcttctccaatcctttaactctctataaagttcatatccaataagcagtaatgcagctaatccaattatccccataataacatgtgtcgttacttgagcaacattaataatatcaacataaatttcatttattttggcacttccattactaaaatcaagttgagttttaggtggtacatacatggaatctgcatcaaatgtattattcaaatgagtattaacttgtcttttcaattcaccaaatggtttatcaattatttttcgtgtaaaattttgaacatcagtaaaatcaggtattttatcctttaaatcttcaattttatcattaatactaccaggtatttgccaatcttgcatatttttgatagttaaattaactttatttaattgttcatctaaattagattgttgattagtcttaccaccacttttaaacaaatgttttaatgcatcacccgtatcatcagctgtatgtatcacatcatttattacatctgataaatcacctaacccaacatttaattcctttgcaaatgaaatcaaagtatcatttgcagtagttataacactctcagttgcattcaatgctaccataacagtatcatcaataactgcggttaacaaacaagcataagtaccaactgataattcaattatgaacattattaattcttcacttgcagtaatcattaaagtcagagttttcattaagccatgatttgcagattctatagatttagcaatcataagatttgaagcttttgatatataatgtgggaatgaaacaatatcagatgcgtatatacctattgaatcatataatgcatgagtttgagatttagcttgttctaatgaattaactaatgaatttaagaaaaataatagttttataatgaaaaagcaataaaatacagtatatggattcagcaataattgtgttaatttctctttgaaattcaaatatggtcttctgtaatagtttgtctcaatggtagacggatgagtaaacgttgttgtcattagttgataataggagtataaagaatgcaattactcaaagaaagactgttagtaaagcattatcattatgttaaatctcgtacatctgggtatatggtattgtaatactaatgattgtttaccagaggtattttacagttctacaaagatctaattattgcaaaaccatcatgttaacgttctgcaaccaacatgaaacaagggtgagacaattcaaaaaactgattacgtaataaattattgatgattcacttaaattaaacttactgttaactcactttatcatcacagaagtactatataattgaggattatctataatttaaagataaggttttgatgggaagtattaattaataacaactttaacgttttatagaaatcttagagaataatacataattaaatatctaaaccatcagttgaaccccaactgtaaatattccaacctaatgaacctgcttcatcaccataaagaagtttacattcatcacctcttgatgcacctgctgcaacaatagcaggtaaaagatgttcatttgtaggatgagcagctttatatatttctttccattctggatttcttggtaattgtttcaatgcctctaattgatcttcatgttttgtatcaagtaaaagtttatttataatttcatggaatggtttattataatgtaatggtttattacctaaagctctagccatatgatgatctcttaaattatgaactgacataccagagaataaaattgcaccatttaaatctctatatttacttaaagcttcacctaatctataatgaatttcaatatcagaagtacctgcaagtgaaacttgaattaatggtacttcaacatctaatttatttgaatctgcaatagttggatcaccaaaagcaacttttaaaggaacgaaaacaccatgatcaatacctctttcttgagttttagattggaaccaatctgattcttttaaagttttaacaatatcattggcaataaatttattgggaactgtatgaaattgagtttcataaaatcttttaggaaatccataataatcataaattaaaccattttcatcagatctaatttttttagaagttacagaattttgggtataccaagcttcaccaataccaggtaatgcaacttcaatttcatcgggtttagttgtttgccaatgagctgatacaactataataaaatcaggtttaactttattttgaatatatctaccaacttttttagttgtttcccaagcacctggattatcaagaccatcagcaaaatctggtccaccatgagagaaaaagaaaattggtaatggtttctttgatggagattcattaaatacgaaatgttcagattcagccatagttatatttttaatgttatcaattagtcttgtcgatgatttatttgcagaatttaaaattttataaaatatagacattaaaatgatgattaaagtaatgagaatatgactagtatttatatcaagattcatttattcaaccatttgatgtcaatgagaaatactgtctcaatttgaaccacaatttgtaattatttatactaaaaaaataatgaatcaaccacagtaataagagaattaataagagatcatcgattattaaagctgacaaactacggtgcacagcctgaaaggtttttttattgcgggatccaacactgccgacttttggaattattaattcaagtagtagatcatattatgtaatcaggtgatatttttgaatattatgcatgcatgttataaagc
